(19) United States
(12) Patent Application Publication
(10) Pub. No.: US 2007/0213293 A1
(43) Pub. Date: Sep. 13, 2007

(54) RNAI THERAPEUTIC FOR RESPIRATORY VIRUS INFECTION

(75) Inventors: James Anthony McSwiggen, Bothell, WA (US); Qing Ge, Rolla, MO (US)

Correspondence Address: NASTECH PHARMACEUTICAL COMPANY INC, 3830 MONTE VILLA PARKWAY, BOTHELL, WA, 98021-7266, US

(73) Assignee: NASTECH PHARMACEUTICAL COMPANY INC., Bothell, WA (US)

(21) Appl. No.: 11/687,564

(22) Filed: Mar. 16, 2007

Related U.S. Application Data
(63) Continuation-in-part of application No. PCT/US06/13374, filed on Apr. 7, 2006.
(60) Provisional application No. 60/669,942, filed on Apr. 8, 2005.

(51) Int. Cl. A61K 48/00; C07H 21/02

(52) U.S. Cl. 514/44; 536/23.1

(57) ABSTRACT

Double stranded siRNA molecules for combating a respiratory virus, wherein the strands of an siRNA molecule may be from about 15 to about 60 nucleotides, and uses thereof. One strand of an siRNA molecule can be a nucleic acid sequence identical to a conserved site, or a variant thereof, within the nucleic acid sequence of the respiratory virus.

### CROSS REFERENCE TO RELATED APPLICATIONS

[0001] This application is a continuation-in-part application under 35 U.S.C. §120 of copending PCT International Application No. PCT/2006/013374, filed Apr. 7, 2006, which claims the benefit of U.S. Provisional Application No. 60/669,942, filed Apr. 8, 2005, the disclosures of each of which are hereby incorporated by reference in their entirety.

### BACKGROUND OF THE INVENTION

[0002] Pathogenic viral infections are some of the most widely spread infections worldwide. For example, a family of such viruses is the influenza family. An estimated 20 to 40 million people died during the 1918 influenza A virus pandemic. In the United States, about 20 to 40 thousand people die from influenza A virus infection or its complications each year. During epidemics, the number of influenza related hospitalizations may reach over 300,000 in a single winter season. There is no superior therapy for influenza virus infection, and existing vaccines are limited in value in part because of the properties of antigenic shift and drift. Treatment or prevention of infections by a number of other viruses that are pathogenic to humans and other animals face similar difficulties. There is a great need for new means to combat such pathogenic viral infections.

[0003] RNA Interference (RNAi) refers to methods of sequence-specific post-transcriptional gene silencing which is mediated by a double-stranded RNA (dsRNA) called a short interfering RNA (siRNA). See Fire, et al., Nature 391:806, 1998, and Hamilton, et al., Science 286:950-951, 1999. RNAi is shared by diverse flora and phyla and is believed to be an evolutionarily-conserved cellular defense mechanism against the expression of foreign genes. See Fire, et al., Trends Genet. 15:358, 1999.

[0004] RNAi is therefore a ubiquitous, endogenous mechanism that uses small noncoding RNAs to silence gene expression. See Dykxhoorn, D. M. and J. Lieberman, Annu. Rev. Biomed. Eng. 8:377-402, 2006. RNAi can regulate important genes involved in cell death, differentiation, and development. RNAi may also protect the genome from invading genetic elements, encoded by transposons and viruses. When a siRNA is introduced into a cell, it binds to the endogenous RNAi machinery to disrupt the expression of mRNA containing complementary sequences with high specificity. Any disease-causing gene and any cell type or tissue can potentially be targeted. This technique has been rapidly utilized for gene-function analysis and drug-target discovery and validation. Harnessing RNAi also holds great promise for therapy, although introducing siRNAs into cells in vivo remains an important obstacle.

[0005] The mechanism of RNAi, although not yet fully characterized, is through cleavage of a target mRNA. The RNAi response involves an endonuclease complex known as the RNA-induced silencing complex (RISC), which mediates cleavage of a single-stranded RNA complementary to the antisense strand of the siRNA duplex. Cleavage of the target RNA takes place in the middle of the region complementary to the antisense strand of the siRNA duplex (Elbashir, et al., Genes Dev. 15:188, 2001).

[0006] One way to carry out RNAi is to introduce or express a siRNA in cells. Another way is to make use of an endogenous ribonuclease III enzyme called dicer. One activity of dicer is to process a long dsRNA into siRNAs. See Hamilton, et al., Science 286:950-951, 1999; Berstein, et al., Nature 409:363, 2001. A siRNA derived from dicer is typically about 21-23 nucleotides in overall length with about 19 base pairs duplexed. See Hamilton, et al., supra; Elbashir, et al., Genes Dev. 15:188, 2001. In essence, a long dsRNA can be introduced in a cell as a precursor of a siRNA.

[0007] An unmet need exists for molecules, compositions, and modalities for effective therapeutics in treating, ameliorating, or preventing pathogenic viral infections, diseases and disorders. This invention meets such needs and provides related advantages.

### BRIEF DESCRIPTION OF THE FIGURES

[0008] FIG. 1. Therapeutic administration of siRNA inhibits influenza virus production in mice. Mice were injected with NP-siRNA or PA-siRNA complexed with jetPEI 5 hours following influenza infection. Virus titers were measured in lung homogenates 28 hours post-infection by MDCK-HA assay. Each data point represents one mouse. P values between groups indicate statistical significance.

[0009] FIG. 2. Influenza-specific siRNA treatment provides broad cross-protection against lethal challenge with highly pathogenic H5 and H7 avian influenza A viruses. BALB/c mice (8 per group) were given 50 μg siRNA intravenously one day before virus challenge and another 20 μg of siRNA intranasally on the day of virus challenge. Body weights and survival of mice were monitored for 16 days after 10 LD50 dose of intranasal virus challenge. Filled circles, GFP-specific siRNA; open circles, NP plus PA-specific siRNAs. P values are indicated.

[0010] FIG. 3. BALB/c mice were treated intranasally with indicated amounts of NP specific siRNA in PBS or PBS control. Two hours later, all mice were infected intranasally (1000 pfu/mouse) with the PR8 serotype. The lungs were harvested 24 hours post-infection, and viral titer was measured from lung homogenates by MDCK-HA assay. P values between PBS and siRNA groups indicate statistical significance with 0.5, 1 and 2 mg/kg siRNA treated groups.

[0011] FIG. 4. BALB/c mice were administered control and NP-targeting siRNA intranasally (10 mg/kg, in PBS). Three hours later all the mice were infected i.n with PR8 virus (50 pfu/mouse). The lungs were harvested at 24 and 48 hours post-infection and total RNA was isolated from the left lung. Total mRNA was reverse transcribed to cDNA using dT18 primers. Real time PCR was carried out using PB1 specific primers to quantify viral mRNA levels. GAPDH was used as an internal control. The right and middle lungs were homogenized and the viral titer was measured by MDCK-HA assay. The virus titer in the samples at 48 hour post-infection is shown in the figure (statistic significance was found between PBS and NP siRNA treated group using student t test (p=0.01); the titer in the samples 24 hours post-infection was too low to detect, possibly due to siRNA directed suppression.

[0012] FIG. 5. Balb/c mice were treated intranasally with 10 mg/kg cyclophilin B specific siRNA or GFP siRNA in PBS or PBS control. There were five mice per group. The mouse lungs were harvested 24 later. Total RNA was purified from the lung samples and reverse transcription was conducted using dT18 primer. Cyclophilin B-specific primers were used in real-time PCR to quantify the target mRNA level. GAPDH-specific primers were also used in the PCR reaction as control.

[0013] FIG. 6. Influenza virus suppression in vivo by intranasal administration of cochleate siRNA formulations is shown.

[0014] FIG. 7. Influenza virus suppression in vivo by intravenous administration of cochleate siRNA formulations is shown.

[0015] FIG. 8A. Dose-response profile of intravenously administered siRNA delivered in cochleate formulations for influenza virus suppression.

[0016] FIG. 8B. Influenza virus suppression in vivo by oral gavage administration of cochleate siRNA formulations is shown.

### DETAILED DESCRIPTION OF THE INVENTION

[0017] This invention is based in part on the phenomenon of RNA Interference (RNAi). Therein, the presence in a cell of double-stranded RNA containing a portion that is complementary to a target RNA inhibits expression of the target RNA in a sequence-specific manner. Generally, inhibition is caused by cleavage of the target or inhibition of its translation. While RNAi is a normal cellular response to insults such as pathogen infection, it is also an effective mechanism to return to stasis the system perturbed by such an infection. Further, RNAi can be used to specifically disrupt cellular signaling pathways.

[0018] The double-stranded RNA structures that drive RNAi activity are siRNAs, shRNAs, and other double-stranded structures (dsRNAs) that can be processed to yield an siRNA or shRNA (or any other small RNA species that inhibits expression of a target transcript by RNA interference). RNAi-inducing entities such as siRNAs and shRNAs can be introduced into a subject, or an isolated cell thereof, and modulate specific signaling pathways. Further, these dsRNAs are useful therapeutics to prevent and treat diseases or disorders characterized by aberrant cell signaling. For instance, virus that infect mammals replicate by taking control of cellular machinery of the host cell. It is therefore useful to use RNAi technology to disrupt the viral signaling pathway that controls virus production.

[0019] It is known that certain viral genes control critical in two stages of the viral life cycle. Prior work in the art has focused on the viral polymerases are effective targets for siRNA as they are required for viral replication. For example, RNA-dependent RNA polymerase (RdRP) is an essential polypeptide in both transcription and replication. This has led to the speculation that silencing of RdRP subunits would lead to a nearly total loss of all RNA synthesis and thus result in a drastic inhibition of virus production. Indeed, this result has been observed in RSV, vesicular stomatitis and parainfluenza virus. (See, Barik S., Control of nonsegmented negative-strand RNA virus replication by siRNA, Virus Res. Jun. 1, 2001;102(1):27-35; and Bitko, et al., Phenotypic silencing of cytoplasmic genes using sequence-specific double-stranded short interfering RNA and its application in the reverse genetics of wild type negative-strand RNA viruses, BMC Microbiol. 2001;1(1):34. Epub, Dec. 20, 2001.) Another viral protein, variously termed nucleoprotein, capsid, or nucleocapsid, is recognized to be involved in, e.g., viral transcription and replication. However, antisense studies performed on nucleoprotein did not indicate that the transcript encoding this polypeptide is as suitable a target as polymerase. (See, Hatta, et al., Inhibition of influenza virus RNA polymerase and nucleoprotein genes expression by unmodified, phosphorothioated, and liposomally encapsulated oligonucleotides, Biochem. Biophys. Res. Commun. Jun. 14, 1996; 223(2):341-6; and Mizuta, et al., Antisense oligonucleotides directed against the viral RNA polymerase gene enhance survival of mice infected with influenza A, Nat. Biotechnol. June 1999;17(6):583-7). Recent studies with siRNA have suggested that nucleoprotein be investigated as a possible target of siRNA. Gitlin, et al., Short interfering RNA confers intracellular antiviral immunity in human cells, Nature Jul. 25, 2002; 418(6896):430-4; Fowler, et al., Inhibition of Marburg virus protein expression and viral release by RNA interference, J. Gen. Virol. April 2005; 86(Pt 4):1181-8; and Yuan, et al., Inhibition of coxsackievirus B3 replication by small interfering RNAs requires perfect sequence match in the central region of the viral positive strand, J. Virol. February 2005;79(4):2151-9). The present invention demonstrates the use of siRNAs directed to viral nucleoprotein sequences to disrupt viral signaling pathways and inhibit viral replication. Further, the present inventors determined that inhibition or silencing of another viral protein, nucleoprotein or nucleocapsid protein, has similar effects to inhibiting polymerase activity. Thus, a nucleoprotein transcript is preferred target for siRNA.

[0020] While not wishing to be bound by any particular theory, the broad effect of NP siRNA is likely a result of the importance of NP in binding and stabilizing vRNA and cRNA, instead of NP-specific siRNA non-specifically targeting RNA degradation. For example, the NP gene segment in influenza virus encodes a single-stranded RNA-binding nucleoprotein, which can bind to both vRNA and cRNA. During the viral life cycle, NP mRNA is first transcribed and translated. The primary function of the NP protein is to encapsidate the virus genome for the purpose of RNA transcription, replication and packaging. In the absence of NP protein, the full-length synthesis of both vRNA and cRNA is strongly impaired. When NP siRNA induces the degradation of NP RNA, NP protein synthesis is impaired and the resulting lack of sufficient NP protein subsequently affects the replication of other viral gene segments. In this way, NP siRNA is able to potently inhibit virus production at a very early stage. Thus, the multifunctional properties of viral nucleoproteins make them useful targets for RNAi-based therapy, offering the opportunity to intervene at multiple different stages of the viral life cycle by inhibiting a single gene.

[0021] It has been hypothesized that the number of NP protein molecules in infected host cells regulates mRNA synthesis, as opposed to replication of genome RNA (vRNA and cRNA). Using a temperature-sensitive mutation in the NP protein, previous studies have shown that cRNA, but not mRNA, synthesis was temperature sensitive both in vitro and in vivo. NP protein has been shown to be required for elongation and anti-termination of the nascent cRNA and vRNA transcripts. The results presented herein demonstrate that viral NP-specific siRNA inhibits the accumulation of all viral RNAs in infected cells. While not wishing to be bound by any particular theory, it appears probable that in the presence of NP-specific siRNA, the newly transcribed NP mRNA is degraded, resulting in the inhibition of NP protein synthesis following virus infection. Without newly synthesized NP, further viral transcription and replication, and therefore new virion production is inhibited.

### DEFINITIONS

[0022] For convenience, certain terms used in the specification, examples, and appended claims are collected here. Unless otherwise defined, all technical and scientific terms used herein have the same meaning as commonly understood by one of ordinary skill in the art to which this invention pertains. However, to the extent that these definitions vary from meanings circulating within the art, the definitions below are to control.

[0023] A “nucleotide” comprises a nitrogenous base, a sugar molecule, and a phosphate group. A “nucleoside” comprises a nitrogenous base (nucleobase) linked to a sugar molecule. In a naturally occurring nucleic acid, phosphate groups covalently link adjacent nucleosides to form a polymer. A nucleic acid may include naturally occurring nucleosides (e.g., adenosine, thymidine, guanosine, cytidine, uridine, deoxyadenosine, deoxythymidine, deoxyguanosine, and deoxycytidine), nucleoside analogs (e.g., 2-aminoadenosine, 2-thiothymidine, inosine, pyrrolo-pyrimidine, 3-methyl adenosine, C5-propynylcytidine, C5-propynyluridine, C5-bromouridine, C5-fluorouridine, C5-iodouridine, C5-methylcytidine, 7-deazaadenosine, 7-deazaguanosine, 8-oxoadenosine, 8-oxoguanosine, O(6)-methylguanine, and 2-thiocytidine), chemically modified bases, biologically modified bases (e.g., methylated bases), intercalated bases, modified sugars (e.g., 2′-fluororibose, ribose, 2′-deoxyribose, arabinose, and hexose).

[0024] The term “RNA” or “RNA molecule” or “ribonucleic acid molecule” refers to a polymer of ribonucleotides. The term “DNA” or “DNA molecule” or deoxyribonucleic acid molecule” refers to a polymer of deoxyribonucleotides. DNA and RNA can be synthesized naturally (e.g, by DNA replication or transcription of DNA or RNA, respectively). RNA can be post-transcriptionally modified. DNA and RNA can also be chemically synthesized. The terms “target mRNA” and “target transcript” are synonymous as used herein.

[0025] The term “RNA interference” (“RNAi”) refers to selective intracellular degradation of RNA (also referred to as gene silencing). RNAi also includes translational repression by microRNAs or siRNAs acting like microRNAs. RNAi can be initiated by introduction of small interfering RNAs (siRNAs) or production of siRNAs intracellularly (e.g., from a plasmid or transgene), to silence the expression of one or more target genes. Alternatively, RNAi occurs in cells naturally to remove foreign RNAs (e.g., viral RNAs). Natural RNAi proceeds via dicer-directed fragmentation of precursor dsRNA which direct the degradation mechanism to other cognate RNA sequences.

[0026] The term “small interfering RNA” (“siRNA”), also referred to in the art as “short interfering RNAs,” refers to an RNA (or RNA analog) comprising between about 10-60 nucleotides (or nucleotide analogs) that is capable of directing or mediating RNA interference. The term “siRNA” includes both double stranded siRNA and single stranded siRNA. Generally, as used herein the term “siRNA” refers to double stranded siRNA (as compared to single stranded or antisense RNA). The term “short hairpin RNA” (“shRNA”) refers to an siRNA (or siRNA analog) precursor that is folded into a hairpin structure and contains a single stranded portion of at least one nucleotide (a “loop”), e.g., an RNA molecule that contains at least two complementary portions hybridized or capable of hybridizing to form a double-stranded (duplex) structure sufficiently long to mediate RNAi (as described for siRNA duplexes), and at least one single-stranded portion, typically between approximately 1 and 10 nucleotides in length that forms a loop connecting the regions of the shRNA that form the duplex portion. The duplex portion may, but typically does not, contain one or more mismatches and/or one or more bulges consisting of one or more unpaired nucleotides in either or both strands. Without wishing to be bound by theory, shRNAs are thought to be processed into siRNAs by the conserved cellular RNAi machinery. shRNAs are capable of inhibiting expression of a target transcript that is complementary to a portion of the shRNA (referred to as the antisense or guide strand of the shRNA). In general, the features of the duplex formed between the guide strand of the shRNA and a target transcript are similar to those of the duplex formed between the guide strand of an siRNA and a target transcript. In certain embodiments of the invention the 5′ end of an shRNA has a phosphate group while in other embodiments it does not. In certain embodiments of the invention the 3′ end of an shRNA has a hydroxyl group.

[0027] The term “RNAi-inducing entity” or “RNAi agent” refers to an RNA species (other than a naturally occurring molecule not modified by the hand of man or transported into its location by the hand of man) whose presence within a cell results in RNAi and leads to reduced expression of an RNA to which the RNAi agent is targeted. The RNAi agent may be, for example, an siRNA or shRNA. In certain embodiments of the invention an siRNA may contain a strand that inhibits expression of a target RNA via a translational repression pathway utilized by endogenous small RNAs referred to as microRNAs. In certain embodiments of the invention an shRNA may be processed intracellularly to generate an siRNA that inhibits expression of a target RNA via this microRNA translational repression pathway. Any “target RNA” may be referred to as a “target transcript” regardless of whether the target RNA is a messenger RNA. The terms “target RNA” and “target transcript” are used interchangeably herein. The term RNAi-inducing agent encompasses RNAi agents and vectors (other than naturally occurring molecules not modified by the hand of man as described above) whose presence within a cell results in RNAi and leads to reduced expression of a transcript to which the RNAi agent is targeted.

[0028] An “RNAi-inducing vector” includes a vector whose presence within a cell results in transcription of one or more RNAs that self-hybridize or hybridize to each other to form an RNAi agent. In various embodiments of the invention this term encompasses plasmids, e.g., DNA vectors (whose sequence may comprise sequence elements derived from a virus), or viruses, (other than naturally occurring viruses or plasmids that have not been modified by the hand of man), whose presence within a cell results in production of one or more RNAs that self-hybridize or hybridize to each other to form an RNAi agent. In general, the vector comprises a nucleic acid operably linked to expression signal(s) so that one or more RNA molecules that hybridize or self-hybridize to form an RNAi agent is transcribed when the vector is present within a cell. Thus the vector provides a template for intracellular synthesis of the RNAi agent. For purposes of inducing RNAi, presence of a viral genome into a cell (e.g., following fusion of the viral envelope with the cell membrane) is considered sufficient to constitute presence of the virus within the cell. In addition, for purposes of inducing RNAi, a vector is considered to be present within a cell if it is introduced into the cell, enters the cell, or is inherited from a parental cell, regardless of whether it is subsequently modified or processed within the cell. An RNAi-inducing vector is considered to be targeted to a transcript if presence of the vector within a cell results in production of one or more RNAs that hybridize to each other or self-hybridize to form an RNAi agent that is targeted to the transcript, i.e., if presence of the vector within a cell results in production of one or more RNAi agent targeted to the transcript. Use of the term “induce” is not intended to indicate that the RNAi agent necessarily activates or upregulates RNAi in general but simply indicates that presence of the vector within a cell results in production of an RNAi agent within the cell, leading to an RNAi-mediated reduction in expression of an RNA to which the agent is targeted.

[0029] An RNAi-inducing entity is considered to be targeted to a target transcript for the purposes described herein if (1) the agent comprises a strand that is substantially complementary to the target transcript over a window of evaluation between 15-29 nucleotides in length, e.g., 15, more preferably at least about 17, yet more preferably at least about 18 or 19 to about 21-23 or 24-29 nucleotides in length. For example, in various embodiments of the invention the agent comprises a strand that has at least about 70%, preferably at least about 80%, 84%, 89%, 90%, 91%, 92%, 93%, 94%, 95%, 96%, 97%, 98%, 99%, or 100% precise sequence complementarity with the target transcript over a window of evaluation between 15-29 nucleotides in length, e.g., over a window of evaluation of at least 15, more preferably at least about 17, yet more preferably at least about 18 or 19 to about 21-23 or 24-29 nucleotides in length; or (2) one strand of the RNAi agent hybridizes to the target transcript under stringent conditions for hybridization of small (<50 nucleotide) RNA molecules in vitro and/or under conditions typically found within the cytoplasm or nucleus of mammalian cells. In addition, in the case of agents that act via the microRNA translational repression pathway, the duplex formed by the agent and the target contains at least one bulge and/or mismatch. In certain embodiments of the invention a GU or UG base pair in a duplex formed by a guide strand and a target transcript is not considered a mismatch for purposes of determining whether an RNAi agent is targeted to a transcript.

[0030] An RNA-inducing vector whose presence within a cell results in production of an RNAi agent that is targeted to a transcript is also considered to be targeted to the transcript. Since the effect of targeting a transcript is to reduce or inhibit expression of the gene that directs synthesis of the transcript, an RNAi agent targeted to a transcript is also considered to target the gene that directs synthesis of the transcript even though the gene itself (e.g., genomic DNA in the case of a cell) is not thought to interact with the agent or components of the cellular silencing machinery. Thus an RNAi agent or vector that targets a transcript is understood to target the gene that provides a template for synthesis of the transcript.

[0031] A viral “nucleoprotein” (also termed a “capsid protein” or a “nucleocapsid protein”) is a viral polypeptide that sequesters viral RNA and affects viral transcription. The viral nucleoprotein is capable of forming a nucleic acid/protein complex (i.e., a ribonucleoprotein (RNP) complex). Nucleoproteins are also termed “NS” in double stranded viruses (e.g., NS-6). A nucleoprotein is distinguished from an outer capsid protein, which generally does not contact and sequester the viral genome. The terms “nucleoprotein mRNA,” “NP mRNA”, “nucleoprotein transcript,” and “NP transcript” are understood to include any mRNA that encodes a viral nucleoprotein or its functional equivalent as described herein.

[0032] As will be appreciated by one of ordinary skill in the art, proteins fulfilling one or more functions of a viral nucleoprotein are referred to by a number of different names, depending on the particular virus of interest. For example, in the case of certain viruses such as influenza the protein is known as nucleoprotein (NP) while in the case of a number of other single-stranded RNA viruses, proteins that fulfill a similar role are referred to as nucleocapsid (NC or N) proteins. In yet other viruses, analogous proteins that both interact with genomic nucleic acid and play a structural role in the viral particle are considered to be capsid (C) proteins.

[0033] As used herein, the terms “nucleoprotein mRNA,” “NP mRNA”, “nucleoprotein transcript,” and “NP transcript” are understood to include any mRNA that encodes a viral nucleoprotein or its functional equivalent as described herein. Any virus containing a nucleoprotein gene or the functional equivalent thereof is suitable as an siRNA target. By way of non-limiting example, several groups of target viruses are described herein in greater detail.

[0034] “Subject” includes living organisms such as humans, monkeys, cows, sheep, horses, pigs, cattle, goats, dogs, cats, mice, rats, cultured cells therefrom, and transgenic species thereof In a preferred embodiment, the subject is a human. A subject is synonymous with a “patient.” Administration of the compositions of the present invention to a subject to be treated can be carried out using known procedures, at dosages and for periods of time effective to treat the condition in the subject. An effective amount of the therapeutic compound necessary to achieve a therapeutic effect may vary according to factors such as the age, sex, and weight of the subject, and the ability of the therapeutic compound to treat the foreign agents in the subject. Dosage regimens can be adjusted to provide the optimum therapeutic response. For example, several divided doses may be administered daily or the dose may be proportionally reduced as indicated by the exigencies of the therapeutic situation.

[0035] As used herein, the terms “approximately” or “about” in reference to a number are generally taken to include numbers that fall within a range of 5% in either direction (greater than or less than) the number unless otherwise stated or otherwise evident from the context (except where such number would exceed 100% of a possible value). Where ranges are stated, the endpoints are included within the range unless otherwise stated or otherwise evident from the context.

[0036] The term “complementary” is used herein in accordance with its art-accepted meaning to refer to the capacity for precise pairing between particular bases, nucleosides, nucleotides or nucleic acids. For example, adenine (A) and uridine (U) are complementary; adenine (A) and thymidine (T) are complementary; and guanine (G) and cytosine (C), are complementary and are referred to in the art as Watson-Crick base pairings. If a nucleotide at a certain position of a first nucleic acid sequence is complementary to a nucleotide located opposite in a second nucleic acid sequence, the nucleotides form a complementary base pair, and the nucleic acids are complementary at that position. One of ordinary skill in the art will appreciate that the nucleic acids are aligned in antiparallel orientation (i.e., one nucleic acid is in 5′ to 3′ orientation while the other is in 3′ to 5′ orientation). A degree of complementarity of two nucleic acids or portions thereof may be evaluated by determining the total number of nucleotides in both strands that form complementary base pairs as a percentage of the total number of nucleotides over a window of evaluation when the two nucleic acids or portions thereof are aligned in antiparallel orientation for maximum complementarity. For example, AAAAAAAA (SEQ ID NO: 17260) and TTTGTTAT (SEQ ID NO: 17261) are 75% complementary since there are 12 nucleotides in complementary base pairs out of a total of 16. Nucleic acids that are at least 70% complementary over a window of evaluation are considered substantially complementary over that window. Specifically, if the window of evaluation is 15-16 nucleotides long, substantially complementary nucleic acids may have 0-3 mismatches within the window; if the window is 17 nucleotides long, substantially complementary nucleic acids may have 0-4 mismatches within the window; if the window is 18 nucleotides long, substantially complementary nucleic acids may have may contain 0-5 mismatches within the window; if the window is 19 nucleotides long, substantially complementary nucleic acids may contain 0-6 mismatches within the window. In certain embodiments the mismatches are not at continuous positions. In certain embodiments the window contains no stretch of mismatches longer than two nucleotides in length. In preferred embodiments a window of evaluation of 15-19 nucleotides contains 0-1 mismatch (preferably 0), and a window of evaluation of 20-29 nucleotides contains 0-2 mismatches (preferably 0-1, more preferably 0).

[0037] “Substantially pure” includes compounds, e.g., drugs, proteins or polypeptides that have been separated from components which naturally accompany it. Typically, a compound is substantially pure when at least 10%, more preferably at least 20%, more preferably at least 50%, more preferably at least 60%, more preferably at least 75%, more preferably at least 90%, and most preferably at least 99% of the total material (by volume, by wet or dry weight, or by mole percent or mole fraction) in a sample is the compound of interest. Purity can be measured by any appropriate method, e.g., in the case of polypeptides by column chromatography, gel electrophoresis or HPLC analysis. A compound, e.g., a protein, is also substantially purified when it is essentially free of naturally associated components or when it is separated from the native contaminants which accompany it in its natural state. Included within the meaning of the term “substantially pure” are compounds, such as proteins or polypeptides, which are homogeneously pure, for example, where at least 95% of the total protein (by volume, by wet or dry weight, or by mole percent or mole fraction) in a sample is the protein or polypeptide of interest.

[0038] “Administering” includes routes of administration which allow the compositions of the invention to perform their intended function, e.g., treating or preventing viral disease. A variety of routes of administration are possible including, but not necessarily limited to parenteral (e.g., intravenous, intraarterial, intramuscular, subcutaneous injection), oral (e.g., dietary), inhalation (e.g., aerosol to lung), topical, nasal, rectal, or via slow releasing microcarriers depending on the disease or condition to be treated. Inhalation and parenteral administration are preferred modes of administration. Formulation of the compound to be administered will vary according to the route of administration selected (e.g., solution, emulsion, gels, aerosols, capsule). An appropriate composition comprising the compound to be administered can be prepared in a physiologically acceptable vehicle or carrier and optional adjuvants and preservatives. For solutions or emulsions, suitable carriers include, for example, aqueous or alcoholic/aqueous solutions, emulsions or suspensions, including saline and buffered media, sterile water, creams, ointments, lotions, oils, pastes and solid carriers. Parenteral vehicles can include sodium chloride solution, Ringer's dextrose, dextrose and sodium chloride, lactated Ringer's or fixed oils. Intravenous vehicles can include various additives, preservatives, or fluid, nutrient or electrolyte replenishers (See generally, Remington's Pharmaceutical Science, 16th Edition, Mack, Ed. (1980)).

[0039] “Effective amount” includes those amounts of the composition of the invention which allow it to perform its intended function, e.g., treating or preventing, partially or totally, viral infection as described herein. The effective amount will depend upon a number of factors, including biological activity, age, body weight, sex, general health, severity of the condition to be treated, as well as appropriate pharmacokinetic properties. For example, dosages of the active substance may be from about 0.01 mg/kg/day to about 100 mg/kg/day, advantageously from about 0.1 mg/kg/day to about 10 mg/kg/day. For example, an siRNA is delivered to a subject in need thereof at a dosage of from about 0.1 mg/kg/day to about 5 mg/kg/day. A therapeutically effective amount of the active substance can be administered by an appropriate route in a single dose or multiple doses. Further, the dosages of the active substance can be proportionally increased or decreased as indicated by the exigencies of the therapeutic or prophylactic situation.

[0040] “Pharmaceutically acceptable carrier” includes any and all solvents, dispersion media, coatings, antibacterial and antifungal agents, isotonic and absorption delaying agents, and the like which are compatible with the activity of the compound and are physiologically acceptable to the subject. An example of a pharmaceutically acceptable carrier is buffered normal saline (0.15M NaCl). The use of such media and agents for pharmaceutically active substances is well known in the art. Except insofar as any conventional media or agent is incompatible with the therapeutic compound, use thereof in the compositions suitable for pharmaceutical administration is contemplated. Supplementary active compounds can also be incorporated into the compositions.

[0041] “Additional ingredients” include, but are not limited to, one or more of the following: excipients; surface active agents; dispersing agents; inert diluents; granulating and disintegrating agents; binding agents; lubricating agents; sweetening agents; flavoring agents; coloring agents; preservatives; physiologically degradable compositions such as gelatin; aqueous vehicles and solvents; oily vehicles and solvents; suspending agents; dispersing or wetting agents; emulsifying agents, demulcents; buffers; salts; thickening agents; fillers; emulsifying agents; antioxidants; antibiotics; antifungal agents; stabilizing agents; and pharmaceutically acceptable polymeric or hydrophobic materials. Other “additional ingredients” which may be included in the pharmaceutical compositions of the invention are known in the art and described, e.g., in Remington's Pharmaceutical Sciences.

[0042] “Conserved sites” of a virus are those sites or sequences that are found to be present in more than about 70% of all known sequences for a given region. The set of siRNA having sequence identity to conserved sites are determined by deriving all 19-mer sequence fragments from each of the known viral sequences, and evaluating the frequency in which each sequence fragment is present as an exact match within each of the set of viral sequences. A first viral sequence contains a 19-mer sequence fragment that extends from position 1 through 19, another from position 2 through 20, another from position 3 through 21, and so on until the 19 nucleotide site at the end of the strand.

[0043] Likewise the second, third, and fourth viral sequences are extracted in the same way, all the way down to the last viral sequence in the list. The sequence fragments are then added to a growing table of sequence fragments and a count is maintained of the number of viral sequences that contain each 19-mer fragment. The fragment frequency is expressed as the percent of the viral sequences that contain each specific 19-mer fragment. The set of siRNA of the invention are those having sequence identity with greater than a majority of the known sequences, preferably greater than about 70% of the known sequences.

[0044] “Conserved sites for influenza virus” do not include sequences disclosed in U.S. patent application Ser. No. 10/674,159 filed Sep. 29, 2003, Publication No. US-2004-0242518 A1 (J. Chen, Q. Ge and M. Eisen, “Influenza Therapeutic”). Conserved sites for influenza virus may exclude some embodiments disclosed in copending U.S. patent application Ser. No. 11/102097 filed Apr. 8, 2005 (a CIP of the above identified application), hereby incorporated by reference in its entirety. Conserved sites for influenza virus include embodiments disclosed in copending PCT Patent Application No. PCT/US06/013374 filed Apr. 7, 2006, hereby incorporated by reference in its entirety.

[0045] “Variants of a conserved site” include a small number of mismatches that are tolerated between the target RNA and the antisense guide sequence of the siRNA duplex. Thus, a single siRNA duplex targeting a highly conserved site in a virus will often still be active against minor variant species having only one or a few mismatches relative to the conserved site. We used the viral mismatch data in an algorithm to expand the list of potential influenza A viral sequence variants that are targetable by a given siRNA duplex, described below in Example 15.

### Nucleoproteins as RNAi Targets

[0046] The present invention provides compositions and methods using RNAi for treating or preventing virus replication or infection in a subject, such as a human or non-human mammal. Preferably, the virus is an RNA virus. For example, the RNA virus is a negative strand virus. Alternatively, the virus is a positive strand virus or a double stranded (ds) virus. A preferred target RNA is the nucleoprotein (also termed nucleocapsid) transcript, or a transcript of a viral gene that accomplishes the function of the viral nucleoprotein. Any virus containing a nucleoprotein gene or the functional equivalent thereof is suitable as an siRNA target. By way of non-limiting example, several groups of target viruses are described herein in greater detail.

### Negative Strand RNA Viruses

[0047] Negative strand RNA viruses have a viral genome that is in the complementary sense of mRNA. Therefore, one of the first activities of negative strand RNA viruses following entry into a host cell is transcription and production of viral mRNAs. For this purpose, the virions carry an N-RNA structure that consists of the viral RNA (vRNA) that is tightly associated with the viral nucleoprotein (N or NP, sometimes called nucleocapsid protein). The RNA-dependent RNA polymerase binds either directly to the N-RNA, as is the case for influenza virus, or it binds with the help of a co-factor, like the phosphoprotein of the paramyxoviruses and the rhabdoviruses. The intact N-RNA is the actual template for transcription rather than the naked vRNA and nucleoprotein contributes to exposure of the nucleotide bases of the N-RNA for efficient reading by the polymerase.

[0048] Commonalties in expression and replication of ssRNA(−) viruses appear to include distinct transcription and replication functions for the RdRp, probably triggered by binding of the virion nucleoprotein (N or NP) subunits. Thus, both RNA(−) and RNA(+) may be found complexed with N proteins in replication complexes.

### Influenza

[0049] Influenza viruses are enveloped, negative-stranded RNA viruses of the Orthomyxoviridae family. They are classified as influenza types A, B, and C, of which influenza A is the most pathogenic and is believed to be the only type able to undergo reassortment with animal strains. Current vaccines based upon inactivated virus are able to prevent illness in approximately 70-80% of healthy individuals under age 65; however, this percentage is far lower in the elderly or immunocompromised. In addition, the expense and potential side effects associated with vaccine administration make this approach less than optimal. There are four antiviral drugs currently approved in the United States for treatment and/or prophylaxis of influenza, amantadine, rimanadine, zanamivir, and oseltamivir, but their use is limited due to concerns about side effects, compliance, and possible emergence of resistant strains. Therefore, there remains a need for the development of effective therapies for the treatment and prevention of influenza infection.

[0050] Influenza nucleocapsid protein or nucleoprotein (NP) is the major structural protein that interacts with the RNA segments to form RNP. It is encoded by RNA segment 5 of influenza A virus and is 1,565 nucleotides in length. NP contains 498 amino acids. NP protein is critical in virus replication. The number of NP protein molecules in infected cells has been hypothesized to regulate the levels of mRNA synthesis versus genome RNA (vRNA and cRNA) replication (1) Using a temperature-sensitive mutation in the NP protein, previous studies have shown that cRNA, but not mRNA, synthesis was temperature-sensitive both in vitro and in vivo (28, 29). NP protein was also shown to be required for elongation and antitermination of nascent cRNA and vRNA transcripts (29, 30). The present inventors have found that NP-specific siRNA inhibited the accumulation of all viral RNAs in infected cells. Probably, in the presence of NP-specific siRNA, the newly transcribed NP mRNA is degraded, resulting in inhibition of NP protein synthesis. Without newly synthesized NP, further viral transcription and replication are blocked, as is new virion production.

### RNA-Inducing Entities—siRNA and shRNA Molecules

[0051] The present invention features siRNA molecules, methods of making siRNA molecules and methods (e.g., prophylactic and/or therapeutic methods and methods for research) for using siRNA molecules. The siRNA molecule can have a length from about 10-60 or more nucleotides (or nucleotide analogs), about 15-25 nucleotides (or nucleotide analogs), or about 19-23 nucleotides (or nucleotide analogs). The siRNA molecule can have nucleotide (or nucleotide analog) lengths of about 10-20, 20-30, 30-40, 40-50, 15, 16, 17, 18, 19, 20, 21, 22, 23, 24, 25, 26, 27, 28, or 29. In a preferred embodiment, the siRNA molecule has a length of 19 nucleotides. It is to be understood that all ranges and values encompassed in the above ranges are within the scope of the present invention. Generally, long dsRNAs (over 60 nucleotides) are less preferable, as they have been found to induce cell death (termed the “interferon response”) in mammalian cells, such as human cells. siRNAs can preferably include 5′ terminal phosphate and a 3′ short overhang of about 1 or 2 nucleotides. In a preferred embodiment, the RNAi-inducing entity can be a short hairpin siRNA (shRNA) or an expressed shRNA. Examples of such shRNAs and methods of manufacturing the same are discussed in the examples. In another embodiment, the siRNA can be associated with one or more proteins in an siRNA complex.

[0052] The siRNA molecules of the invention are provided to reduce viral gene expression in a host cell by, at least in part, binding to target viral transcripts in a manner that results in destruction of the target viral transcript by the host cell machinery. Thus, the siRNA molecules of the invention include a sequence that is sequence sufficiently complementary to a portion of the viral nucleoprotein gene to mediate RNA interference (RNAi), as defined herein, i e., the siRNA has a sequence sufficiently specific to trigger the degradation of the target RNA by the RNAi machinery or process. The siRNA molecule can be designed such that every residue of the antisense strand is complementary to a residue in the target molecule. Alternatively, substitutions can be made within the molecule to increase stability and/or enhance processing activity of said molecule. Substitutions can be made within the strand or can be made to residues at the ends of the strand.

[0053] The target RNA cleavage reaction guided by siRNAs is highly sequence specific. In general, siRNAs containing a nucleotide sequence identical to a portion of the target gene are preferred for inhibition. As the siRNAs of the invention are generally provided as double stranded molecules, identity and complimentarily of the antisense strand of the siRNA can be determined relative to the target transcript. Thus, as used herein, disclosure of a nucleic acid sequence that is identical to a portion of a nucleic acid encoding a viral nucleoprotein includes both strands of a double stranded siRNA. However, it is recognized that 100% sequence identity between the siRNA and the target gene is not required to practice the present invention. Thus the invention has the advantage of being able to tolerate sequence variations that might be expected due to genetic mutation, strain polymorphism, or evolutionary divergence. For example, siRNA sequences with insertions, deletions, and single point mutations relative to the target sequence are effective for inhibition. Alternatively, siRNA sequences with nucleotide analog substitutions or insertions are effective for inhibition. Moreover, not all positions of a siRNA contribute equally to target recognition. Mismatches in the center of the siRNA are most critical and can essentially abolish target RNA cleavage. In contrast, the 3′ nucleotides of the siRNA (e.g., the 3′ nucleotides of the siRNA antisense strand) typically do not contribute significantly to specificity of the target recognition. In particular, 3′ residues of the siRNA sequence which are complementary to the target RNA (e.g., the guide sequence) generally are not as critical for target RNA cleavage.

[0054] It is known in the art that not all siRNAs are equally effective in reducing or inhibiting expression of any particular target gene. (See, e.g., Holen, T., et al., Nucleic Acids Res. 30(8): 1757-1766, reporting variability in the efficacy of different siRNAs), and a variety of considerations may be employed to increase the likelihood that a selected siRNA may be effective. For example, it may be preferable to select target portions within exons rather than introns. siRNAs may generally be designed in accordance with principles described in Technical Bulletin #003-Revision B, “siRNA Oligonucleotides for RNAi Applications” and Technical Bulletin #4, Dharmacon Research, Inc., Lafayette, CO 80026, a commercial supplier of RNA reagents. The RNAi Technical Reference & Application Guide, from Dharmacon, contains a variety of information regarding siRNA design parameters, synthesis, etc., and is incorporated herein by reference. Additional design considerations that may also be employed are described in Semizarov, D., et al., Proc. Natl. Acad. Sci. 100(11):6347-6352.

[0055] Sequence identity may be determined by sequence comparison and alignment algorithms known in the art. To determine the percent identity of two nucleic acid sequences (or of two amino acid sequences), the sequences are aligned for optimal comparison purposes (e.g., gaps can be introduced in the first sequence or second sequence for optimal alignment). The nucleotides (or amino acid residues) at corresponding nucleotide (or amino acid) positions are then compared. When a position in the first sequence is occupied by the same residue as the corresponding position in the second sequence, then the molecules are identical at that position. The percent identity between the two sequences is a function of the number of identical positions shared by the sequences (i.e., % homology equals the number of identical positions divided by the total number of positions multiplied by 100), optionally penalizing the score for the number of gaps introduced and/or length of gaps introduced.

[0056] The comparison of sequences and determination of percent identity between two sequences can be accomplished using a mathematical algorithm. In one embodiment, the alignment generated over a certain portion of the sequence aligned having sufficient identity but not over portions having low degree of identity (i.e., a local alignment). A preferred, non-limiting example of a local alignment algorithm utilized for the comparison of sequences is the algorithm of Karlin & Altschul, Proc. Natl. Acad. Sci. USA 87:2264-68, 1990, modified as in Karlin & Altschul, Proc. Natl. Acad. Sci. USA 90:5873-77, 1993. Such an algorithm is incorporated into the BLAST programs (version 2.0) of Altschul, et al., J. Mol. Biol. 215:403-10, 1990. In another embodiment, the alignment is optimized by introducing appropriate gaps and percent identity is determined over the length of the aligned sequences (i.e., a gaped alignment). To obtain gaped alignments for comparison purposes, Gaped BLAST can be utilized as described in Altschul, et al., Nucleic Acids Res. 25(17):3389-3402, 1997. In another embodiment, the alignment is optimized by introducing appropriate gaps and percent identity is determined over the entire length of the sequences aligned (i.e., a global alignment). A so preferred, non-limiting example of a mathematical algorithm utilized for the global comparison of sequences is the algorithm of Myers and Miller, CABIOS, 1989. Such an algorithm is incorporated into the ALIGN program (version 2.0) which is part of the GCG sequence alignment software package. When utilizing the ALIGN program for comparing amino acid sequences, a PAM120 weight residue table, a gap length penalty of 12, and a gap penalty of 4 can be used.

[0057] In some embodiments, equal to or more than 70% sequence identity between the siRNA (e.g., the antisense strand of the siRNA) and the portion of the target gene is preferred, which means that the antisense strand of the siRNA is equal to or more than 70% complementary to the target gene.

[0058] In some embodiments, greater than 80% sequence identity, e.g., 84%, 89%, 91%, 92%, 93%, 94%, 95%, 96%, 97%, 98%, 99% or even 100% sequence identity, between the siRNA (e.g., the antisense strand of the siRNA) and the portion of the target gene is preferred. In the context of an siRNA of about 19-25 nucleotides, e.g., at least 16-21 identical nucleotides are preferred, more preferably at least 17-22 identical nucleotides, and even more preferably at least 18-23 or 19-24 identical nucleotides. Alternatively worded, in an siRNA of about 19-25 nucleotides in length, siRNAs having no greater than about 4 mismatches are preferred, preferably no greater than 3 mismatches, more preferably no greater than 2 mismatches, and even more preferably no greater than 1 mismatch. For example, the siRNA contains an antisense strand having 1, 2, 3 or 4 mismatches with the target sequence.

[0059] Alternatively, the siRNA may be defined functionally as including a nucleotide sequence (or oligonucleotide sequence) that is capable of hybridizing with a portion of the target gene transcript (e.g., 400 mM NaCl, 40 mM PIPES pH 6.4, 1 mM EDTA, 50° C. or 70° C. hybridization for 12-16 hours; followed by washing). Additional preferred hybridization conditions include hybridization at 70° C. in 1×SSC or 50° C. in 1×SSC, 50% formamide followed by washing at 70° C. in 0.3×SSC or hybridization at 70° C. in 4×SSC or 50° C. in 4×SSC, 50% formamide followed by washing at 67° C. in 1×SSC. The hybridization temperature for hybrids anticipated to be less than 50 base pairs in length should be 5-10° C. less than the melting temperature (Tm) of the hybrid, where Tm is determined according to the following equations. For hybrids less than 18 base pairs in length, Tm(° C.)=2(# of A+T bases)+4(# of G+C bases). For hybrids between 18 and 49 base pairs in length, Tm(° C.)=81.5+16.6(log 10[Na+])+0.41(% G+C) (600/N), where N is the number of bases in the hybrid, and [Na+] is the concentration of sodium ions in the hybridization buffer ([Na+] for 1×SSC=0.165 M). Additional examples of stringency conditions for polynucleotide hybridization are provided in Sambrook, J., et al., 1989, Molecular Cloning: A Laboratory Manual, Cold Spring Harbor Laboratory Press, Cold Spring Harbor, N.Y., chapters 9 and 11, and Current Protocols in Molecular Biology, 1995, F. M. Ausubel, et al., eds., John Wiley & Sons, Inc., sections 2.10 and 6.3-6.4, incorporated herein by reference. The length of the identical nucleotide sequences may be at least about 10, 12, 15, 17, 20, 22, 25, 27, 30, 32, 35, 37, 40, 42, 45, 47 or 50 bases.

[0060] In one embodiment, the RNA molecules of the present invention are modified, such as to improve stability in serum or in growth medium for cell cultures. In order to enhance the stability, the 3′-residues may be stabilized against degradation, e.g., they may be selected such that they consist of purine nucleotides, e.g., adenosine or guanosine nucleotides. Alternatively, substitution of pyrimidine nucleotides by modified analogues, e.g., substitution of uridine by 2′-deoxythymidine is tolerated and does not affect the efficiency of RNA interference. For example, the absence of a 2′ hydroxyl may significantly enhance the nuclease resistance of the siRNAs in tissue culture medium.

[0061] In a preferred embodiment of the present invention the RNA molecule may contain at least one modified nucleotide analogue (or analog). The nucleotide analogues may be located at positions where the target-specific activity, e.g., the RNAi mediating activity is not substantially affected, e.g., in a region at the 5′-end and/or the 3′-end of the RNA molecule. Particularly, the ends may be stabilized by incorporating modified nucleotide analogues. Preferred nucleotide analogues include sugar- and/or backbone-modified ribonucleotides (i.e., include modifications to the phosphate-sugar backbone). For example, the phosphodiester linkages of natural RNA may be modified to include at least one of a nitrogen or sulfur heteroatom. In preferred backbone-modified ribonucleotides the phosphoester group connecting to adjacent ribonucleotides is replaced by a modified group, e.g., of phosphorothioate group. In preferred sugar-modified ribonucleotides, the 2′ OH-group is replaced by a group selected from H, OR, R, halo, SH, SR, NH₂, NHR, NR₂ or ON, wherein R is C₁-C₆ alkyl, alkenyl or alkynyl and halo is F, Cl, Br or I.

[0062] Also preferred are nucleobase-modified ribonucleotides, i.e., ribonucleotides containing at least one non-naturally occurring nucleobase instead of a naturally occurring nucleobase. Bases may be modified to block the activity of adenosine deaminase. Exemplary modified nucleobases include, but are not limited to, uridine and/or cytidine modified at the 5-position, e.g., 5-(2-amino)propyl uridine, 5-bromo uridine; adenosine and/or guanosines modified at the 8 position, e.g., 8-bromo guanosine; deaza nucleotides, e.g., 7-deaza-adenosine; O— and N-alkylated nucleotides, e.g., N6-methyl adenosine are suitable. It should be noted that the above modifications may be combined.

[0063] In some embodiments, the siRNA can be modified by the substitution of at least one nucleotide with a modified nucleotide. The siRNA can have one or more mismatches when compared to the target sequence of the nucleoprotein transcript and still mediate RNAi as demonstrated in the examples below.

[0064] The ability of the nucleoprotein-directed siRNAs of the present invention to mediate RNAi is particularly advantageous considering the rapid mutation rate of some of the genes of the viruses provided herein, such as genes of an influenza virus. The inventors provide for the use of the nucleoprotein gene as an RNAi target as the inventors have recognized that the nucleoprotein gene generally has a lower rate of mutations as compared to other viral genes. Moreover, in embodiments of the invention, siRNAs are targeted towards conserved regions of the viral nucleoprotein gene. The invention contemplates several embodiments which further leverage this ability by, e.g., synthesizing patient-specific siRNAs or plasmids, and/or introducing several siRNAs staggered along the nucleoprotein gene. In one embodiment, highly and/or moderately conserved regions of the nucleoprotein gene are targeted as discussed in greater detail below. In other embodiments, a biological sample is obtained from a subject. As used herein, a biological sample is any material obtained from the subject containing a viral nucleic acid. For example, one or more of a host subject's infected cells are procured and the genome of the viral nucleoprotein gene within it sequenced or otherwise analyzed to select or synthesize one or more corresponding siRNAs, plasmids or transgenes.

### Manufacture of siRNA

[0065] In one embodiment, siRNAs are synthesized either in vivo or in vitro. Endogenous RNA polymerase of the cell may mediate transcription in vivo, or cloned RNA polymerase can be used for transcription in vivo or in vitro. For transcription from a transgene in vivo or an expression construct, a regulatory region (e.g., promoter, enhancer, silencer, or splice donor and acceptor) may be used to transcribe the siRNA. Inhibition may be targeted by specific transcription in an organ, tissue, or cell type; stimulation of an environmental condition (e.g., infection, stress, temperature, chemical inducers); and/or engineering transcription at a developmental stage or age. A transgenic organism that expresses siRNA from a recombinant construct may be produced by introducing the construct into a zygote, an embryonic stem cell, or another multipotent cell derived from the appropriate organism.

[0066] In addition, not only can an siRNA be used to cleave multiple RNAs within the cell, but the siRNAs can be replicated and amplified within a cell by the host cell enzymes. Alberts, et al., The Cell 452 (4th ed. 2002).

[0067] RNA may be produced enzymatically or by partial/total organic synthesis, any modified ribonucleotide can be introduced by in vitro enzymatic or organic synthesis. In one embodiment, a siRNA is prepared chemically. Methods of synthesizing RNA molecules are known in the art, in particular, the chemical synthesis methods as described in Verma and Eckstein, Annul Rev. Biochem. 67:99-134 (1998). In another embodiment, a siRNA is prepared enzymatically. For example, a siRNA can be prepared by enzymatic processing of a long dsRNA having sufficient complementarity to the desired target RNA. Processing of long dsRNA can be accomplished in vitro, for example, using appropriate cellular lysates and ds-siRNAs can be subsequently purified by gel electrophoresis or gel filtration. In an exemplary embodiment, RNA can be purified from a mixture by extraction with a solvent or resin, precipitation, electrophoresis, chromatography, or a combination thereof. Alternatively, the RNA may be used with no or a minimum of purification to avoid losses due to sample processing.

[0068] The siRNAs can also be prepared by enzymatic transcription from synthetic DNA templates or from DNA plasmids isolated from recombinant bacteria. Typically, phage RNA polymerases are used such as T7, T3 or SP6 RNA polymerase (Milligan & Uhlenbeck, Methods Enzymol. 180:51-62 (1989)). The RNA may be dried for storage or dissolved in an aqueous solution. The solution may contain buffers or salts to inhibit annealing, and/or promote stabilization of the single strands.

siRNA Vectors

[0069] Another aspect of the present invention includes a vector that expresses one or more siRNAs that include sequences sufficiently complementary to a portion of the nucleoprotein gene genome to mediate RNAi. The vector can be administered in vivo to thereby initiate RNAi therapeutically or prophylactically by expression of one or more copies of the siRNAs. In one embodiment, synthetic shRNA is expressed in a plasmid vector. In another, the plasmid is replicated in vivo. In another embodiment, the vector can be a viral vector, e.g., a retroviral vector. Examples of such plasmids and methods of making the same are illustrated in the examples. Use of vectors and plasmids are advantageous because the vectors can be more stable than synthetic siRNAs and thus effect long-term expression of the siRNAs.

[0070] Some target viruses mutate rapidly and may result in a mismatch of even one nucleotide that can, in some instances, impede RNAi. Accordingly, in one embodiment, a vector is contemplated that expresses a plurality of siRNAs to increase the probability of sufficient homology to mediate RNAi. Preferably, these siRNAs are staggered along the nucleoprotein gene, or are clustered in one region of the nucleoprotein gene. For example, a plurality of siRNAs is directed towards a region of the nucleoprotein gene that is about 200 nucleotides in length and contains the 3′ end of the nucleoprotein gene. In one embodiment, one or more of the siRNAs expressed by the vector is a shRNA. The siRNAs can be staggered along one portion of the nucleoprotein gene or target different portions of the nucleoprotein gene. In one embodiment, the vector encodes about 3 siRNAs, more preferably about 5 siRNAs. The siRNAs can be targeted to conserved regions of the nucleoprotein gene.

### Methods of Introducing RNAs, Vectors, and Host Cells

[0071] Physical methods of introducing the agents of the present invention (e.g., siRNAs, vectors, or transgenes) include injection of a solution containing the agent, bombardment by particles covered by the agent, soaking the cell or organism in a solution of the agent, or electroporation of cell membranes in the presence of the agent. A viral construct packaged into a viral particle would accomplish both efficient introduction of an expression construct into the cell and transcription of RNA, including siRNAs, encoded by the expression construct. Other methods known in the art for introducing nucleic acids to cells may be used, such as lipid-mediated carrier transport, chemical-mediated transport, such as calcium phosphate, and the like. Thus the siRNA may be introduced along with components that perform one or more of activities, e.g., enhance siRNA uptake by the cell, inhibit annealing of the two siRNA strands to each other, stabilize the single strands, or otherwise increase inhibition of the target gene.

[0072] The agents may be directly introduced into the cell (i.e., intracellularly); or introduced extracellularly into a cavity, interstitial space, into the circulation of an organism, introduced orally, by inhalation, or may be introduced by bathing a cell or organism in a solution containing the RNA. Vascular or extravascular circulation, the blood or lymph system, and the cerebrospinal fluid are sites where the agent may be introduced.

[0073] Cells may be infected with a target virus upon delivery of the agent or exposed to the target virus after delivery of agent. The cells may be derived from or contained in any organism. The cell may be from the germ line, somatic, totipotent or pluripotent, dividing or non-dividing, parenchyma or epithelium, immortalized or transformed, or the like. The cell may be a stem cell, or a differentiated cell.

[0074] Depending on the particular target gene and the dose of double stranded RNA material delivered, this process may provide partial or complete loss of function for the target gene. A reduction or loss of gene expression in at least 50%, 60%, 70%, 80%, 90%, 95% or 99% or more of targeted cells is exemplary. Inhibition of gene expression refers to the absence (or observable decrease) in the level of viral protein, RNA, and/or DNA. Specificity refers to the ability to inhibit the target gene without manifesting effects on other genes, particularly those of the host cell. The consequences of inhibition can be confirmed by examination of the outward properties of the cell or organism or by biochemical techniques such as RNA solution hybridization, nuclease protection, Northern hybridization, reverse transcription gene expression monitoring with a microarray, antibody binding, enzyme linked immunosorbent assay (ELISA), integration assay, Western blotting, radioimmunoassay (RIA), other immunoassays, and fluorescence activated cell analysis (FACS).

[0075] For RNA-mediated inhibition in a cell line or whole organism, gene expression is conveniently assayed by use of a reporter or drug resistance gene whose protein product is easily assayed. Such reporter genes include acetohydroxyacid synthase (AHAS), alkaline phosphatase (AP), beta galactosidase (LacZ), beta glucoronidase (GUS), chloramphenicol acetyltransferase (CAT), green fluorescent protein (GFP), horseradish peroxidase (HRP), luciferase (Luc), nopaline synthase (NOS), octopine synthase (OCS), and derivatives thereof. Multiple selectable markers are available that confer resistance to ampicillin, bleomycin, chloramphenicol, gentarnycin, hygromycin, kanamycin, lincomycin, methotrexate, phosphinothricin, puromycin, and tetracyclin. Depending on the assay, quantitation of the amount of gene expression allows one to determine a degree of inhibition which is greater than 10%, 33%, 50%, 90%, 95% or 99% as compared to a cell not treated according to the present invention. Lower doses of injected material and longer times after administration of siRNA may result in inhibition in a smaller fraction of cells (e.g., at least 10%, 20%, 50%, 75%, 90%, or 95% of targeted cells).

[0076] Quantitation of gene expression in a cell may show similar amounts of inhibition at the level of accumulation of target RNA or translation of target protein. As an example, the efficiency of inhibition may be determined by assessing the amount of gene product in the cell; RNA may be detected with a hybridization probe having a nucleotide sequence outside the region used for the inhibitory double-stranded RNA, or translated polypeptide may be detected with an antibody raised against the polypeptide sequence of that region.

[0077] The siRNA may be introduced in an amount that allows delivery of at least one copy per cell. Higher doses (e.g., at least 5, 10, 100, 500 or 1000 copies per cell) of material may yield more effective inhibition; lower doses may also be useful for specific applications.

### Diagnostic Methods and Kits

[0078] The invention encompasses the recognition that RNAi-based therapy of infectious diseases, e.g., infections caused by a virus, can desirably incorporate a diagnostic step that determines whether a subject in need of treatment is infected with an infectious agent that is susceptible to inhibition by one or more RNAi-inducing entities. By “susceptible to inhibition” is meant that one or more biological activities of the infectious agent can be effectively inhibited by administration of the RNAi-inducing entity to a subject. Preferably replication, pathogenicity, spread, and/or production of the infectious agent are inhibited. For example, preferably replication, pathogenicity, spread, or production of the agent is inhibited by at least 25% when the RNAi-inducing entity is administered to a subject at a tolerated dose. Preferably the inhibition is sufficient to produce a therapeutically useful effect.

[0079] Influenza virus is used as a non-limiting example to illustrate the diagnostic methods of the invention, which are tailored to allow the selection of an RNAi-inducing entity that is suitable for a subject suffering from an infection. However, it is understood that the methods disclosed herein are appropriate to any virus described herein or any virus that would be recognized by one skilled in the art. The selected RNAi-inducing entity may, of course, also be administered for prophylaxis, e.g., to individuals who have come in contact with the infected individual, regardless of whether those individuals have developed symptoms of infection.

[0080] The invention therefore provides methods for diagnosing virus infection and for determining whether a subject is infected with a virus. In certain embodiments the method comprises determining whether a subject is infected with a virus that is inhibited by one or more of the RNAi-inducing entities of the invention that target a viral nucleoprotein transcript. For example, a sample (e.g., sputum, saliva, nasal washings, nasal swab, throat swab, bronchial washings, broncheal alveolar lavage (BAL) fluid, biopsy specimens, etc.) is obtained from a subject who may be suspected of having a viral infection, e.g., influenza. The sample can be subjected to one or more processing steps. Any such processed sample is considered to be obtained from the subject. The sample is analyzed to determine whether it contains a virus-specific nucleic acid, particularly a nucleoprotein transcript. A “virus-specific nucleic acid” is any nucleic acid, or its complement, that originates from or is derived from a virus and can serve as an indication of the presence of a virus in a sample and, optionally, be used to identify the strain and/or the sequence of a viral gene. The nucleic acid may have been subjected to processing steps following its isolation. For example, it may be reverse transcribed, amplified, cleaved, etc. In certain embodiments the sequence of a virus-specific nucleic acid present in the sample, or its complement, is compared with the sequence of the antisense or sense strand of an RNAi-inducing agent such as an siRNA or shRNA. The word “comparison” is used in a broad sense to refer to any method by which a sequence can be evaluated, e.g., which it can be determined whether the sequence is the same as or different to a reference sequence at one or more positions, or by which the extent of difference can be assessed.

[0081] Any of a wide variety of nucleic acid-based assays can be used. In certain embodiments the diagnostic assay utilizes a nucleic acid comprising a favorably and/or highly conserved target portion or its complement, or a fragment of the favorably and/or highly conserved portion or its complement. In certain embodiments the nucleic acid serves as an amplification primer or a hybridization probe, e.g., in an assay such as those described below.

[0082] In certain embodiments an influenza-specific nucleic acid in the sample is amplified. Isothermal target amplification methods include transcription mediated amplification (TMA), self-sustained sequence replication (3SR), Nucleic Acid Sequence Based Amplification (NASBA), and variations thereof. Detection or comparison can be performed using any of a variety of methods known in the art, e.g., amplification-based assays, hybridization assays, primer extension assays (e.g., allele-specific primer extension in which the corresponding target portions of different influenza virus strains are analogous to different alleles of a gene), oligonucleotide ligation assays (U.S. Pat. Nos. 5,185,243, 5,679,524 and 5,573,907), cleavage assays, heteroduplex tracking analysis (HTA) assays, etc. Examples include the Taqman® assay, Applied Biosystems (U.S. Pat. No. 5,723,591). Cycling probe technology (CPT), which is a nucleic acid detection system based on signal or probe amplification rather than target amplification (U.S. Pat. Nos. 5,011,769, 5,403,711, 5,660,988, and 4,876,187), could also be employed. Invasive cleavage assays, e.g., Invader® assays (Third Wave Technologies), described in Eis, P. S. et al., Nat. Biotechnol. 19:673, 2001, can also be used to detect influenza-specific nucleic acids. Assays based on molecular beacons (U.S. Pat. Nos. 6,277,607; 6,150,097; 6,037,130) or fluorescence energy transfer (FRET) may be used. Molecular beacons are oligonucleotide hairpins which undergo a conformational change upon binding to a perfectly matched template.

[0083] In certain embodiments the assay determines whether an influenza-specific nucleic acid in the sample comprises a portion that is identical to or different from a sense or antisense strand of an RNAi-inducing entity. Optionally the exact differences, if any, are identified. This information is used to determine whether the influenza virus is susceptible to inhibition by the RNAi-inducing entity. In addition to those discussed above, suitable assays for detection and/or genotyping of infectious agents are described in Molecular Microbiology: Diagnostic Principles and Practice, Persing, D. H., et al., (eds.) Washington, D.C.: ASM Press, 2004.

[0084] The diagnostic assays may employ any of the nucleic acids described herein. In certain embodiments of the invention the nucleic acid comprises a nucleic acid portion that is not substantially complementary or substantially identical to a nucleoprotein transcript. For example, the nucleic acid may comprise a primer binding site (e.g., a binding site for a universal sequencing primer or amplification primer), a hybridization tag (which may, for example, be used to isolate the nucleic acid from a sample comprising other nucleic acids), etc. In certain embodiments of the invention the nucleic acid comprises a non-nucleotide moiety. The non-nucleotide moiety may be attached to a terminal nucleotide of the nucleic acid, e.g., at the 3′ end. The moiety may protect the nucleic acid from degradation. In certain embodiments the non-nucleotide moiety is a detectable moiety such as a fluorescent dye, radioactive atom, member of a fluorescence energy transfer (FRET) pair, quencher, etc. In certain embodiments the non-nucleotide moiety is a binding moiety, e.g. biotin or avidin. In certain embodiments the non-nucleotide moiety is a hapten such as digoxygenin, 2,4-Dinitrophenyl (TEG), etc. In certain embodiments the non-nucleotide moiety is a tag usable for isolation of the nucleic acid.

[0085] In certain embodiments of the invention a nucleic acid is attached to a support, e.g., a microparticle such as a bead, which is optionally magnetic. The invention further provides an array comprising a multiplicity of nucleic acids of the invention, e.g., at least 10, 20, 50, etc. The nucleic acids are covalently or noncovalently attached to a support, e.g., a substantially planar support such as a glass slide. See, e.g., U.S. Pat. Nos. 5,744,305; 5,800,992; 6,646,243.

[0086] Information obtained from experiments or from previous experience in treating a virus having a particular sequence within the nucleoprotein gene can also be used to decide whether the virus is susceptible to inhibition by a given RNAi-inducing entity or combination thereof. Susceptibility information can also include theoretical predictions based, for example, on the expected effect of any mismatches that exist between the nucleoprotein virus sequence and the antisense strand of an inhibitory agent.

[0087] The invention provides diagnostic kits for detecting virus infection. Certain of the kits comprise one or more nucleic acids of the invention. Certain of the kits comprise one or more nucleic acids that can be used to detect a portion of an nucleoprotein virus transcript that comprises a preferred target portion for RNAi. The kits may comprise one or more items selected from the group consisting of: a probe, a primer, a sequence-specific oligonucleotide, an enzyme, a substrate, an antibody, a population of nucleotides, a buffer, a positive control, and a negative control. The nucleotides may be labeled. For example, one or more populations of fluorescently labeled nucleotides such as dNTPs, ddNTPs, etc. may be provided.

[0088] The probe can be a nucleic acid that includes all or part of a target portion, e.g., a highly or favorably conserved nucleoprotein target portion, or its complement, or is at least 80% identical or complementary to a target portion, e.g., 100% identical or complementary. In certain embodiments a plurality of probes are provided. The probes differ at one or more positions and can be used for determining the exact sequence of a nucleoprotein virus transcript at such positions. For example, the probes may differentially hybridize to the transcript (e.g., hybridization occurs only if the probe is 100% complementary to a target portion of the transcript). Kits of the invention can comprise specimen collection materials, e.g., a swab, a tube, etc. The components of the kit may be packaged in individual vessels or tubes which will generally be provided in a container, e.g., a plastic or styrofoam container suitable for commercial sale, together with instructions for use of the kit.

### Methods of Treatment

[0089] The present invention provides for both prophylactic and therapeutic methods for treating a subject at risk of (or susceptible to) or a subject having a virus. “Treatment”, or “treating” as used herein, is defined as the application or administration of a therapeutic agent (e.g., a siRNA or vector or transgene encoding same) to a patient, or application or administration of a therapeutic agent to an isolated tissue or cell line from a patient, who has a virus with the purpose to cure, heal, alleviate, relieve, alter, remedy, ameliorate, improve or affect the virus, or symptoms of the virus. The term “treatment” or “treating” is also used herein in the context of administering agents prophylactically, e.g., to inoculate against a virus.

[0090] With regards to both prophylactic and therapeutic methods of treatment, such treatments may be specifically tailored or modified, based on knowledge obtained from the field of pharmacogenomics. “Pharmacogenomics”, as used herein, refers to the application of genomics technologies such as gene sequencing, statistical genetics, and gene expression analysis to drugs in clinical development and on the market. More specifically, the term refers the study of how a patient's genes determine his or her response to a drug (e.g., a patient's “drug response phenotype”, or “drug response genotype”). Thus, another aspect of the invention provides methods for tailoring an individual's prophylactic or therapeutic treatment with either the target gene molecules of the present invention or target gene modulators according to that individual's drug response genotype.

[0091] In related embodiments, a population of two or more different RNAi-inducing agents are administered to a subject, who may be a host to a virus. In one embodiment, the population of two or more RNAi-inducing agents include agents that contain guide strands whose sequences are substantially complementary (preferably 100% complementary) to the same highly conserved region from a variety of strains of a particular virus. In another embodiment, the population of two or more RNAi-inducing agents includes agents that contain guide strands whose sequences are substantially complementary (preferably 100% complementary) to different highly conserved regions from the same virus strain. In yet another embodiment, the population of two or more RNAi-inducing agents include agents that contain guide strands whose sequences are substantially complementary (preferably 100% complementary) to the same highly conserved region from a variety of strains of a particular virus, e.g., an influenza virus and RNAi-inducing agents includes agents that contain guide strands whose sequences are substantially complementary (preferably 100% complementary) to different highly conserved regions from the same virus strain.

### Prophylactic Methods

[0092] In one aspect, the invention provides a method for preventing in a subject, infection with a virus or a condition associated with a viral infection, by administering to the subject a prophylactically effective agent that includes any of the siRNAs or vectors or transgenes discussed herein. Administration of a prophylactic agent can occur prior to the manifestation of symptoms characteristic of a viral infection, such that the viral infection is prevented.

[0093] In a preferred embodiment, the prophylactically effective agent is administered to the subject prior to exposure to the target virus. In another embodiment, the agent is administered to the subject after exposure to the target virus to delay or inhibit its progression, or prevent its integration into the DNA of healthy cells or cells that do not contain a provirus. Preferably, target virus formation is inhibited or prevented. Additionally or alternatively, it is preferable that target virus replication is inhibited or prevented. In one embodiment, the siRNA degrades the target virus RNA in the early stages of its replication, for example, immediately upon entry into the cell. In this manner, the agent can prevent healthy cells in a subject from becoming infected. In another embodiment, the siRNA degrades the viral MRNA in the late stages of replication. Any of the strategies discussed herein can be employed in these methods, such as administration of a vector that expresses a plurality of siRNAs sufficiently complementary to the viral nucleoprotein gene to mediate RNAi.

### Therapeutic Methods

[0094] Another aspect of the invention pertains to methods of modulating target gene expression, protein expression or activity for therapeutic purposes. Accordingly, in an exemplary embodiment, the modulatory method of the invention involves contacting a cell infected with the virus with a therapeutic agent (e.g., a siRNA or vector or transgene encoding same) that is specific for a portion of the viral genome such that RNAi is mediated. These modulatory methods can be performed ex vivo (e.g., by culturing the cell with the agent) or, alternatively, in vivo (e.g., by administering the agent to a subject). The methods can be performed ex vivo and then the products introduced to a subject (e.g., gene therapy).

[0095] The therapeutic methods of the invention generally include initiating RNAi by administering the agent to a subject infected with the virus (e.g., influenza). The agent can include one or more siRNAs, one or more siRNA complexes, vectors that express one or more siRNAs (including shRNAs), or transgenes that encode one or more siRNAs. The therapeutic methods of the invention are capable of reducing viral production (e.g., viral titer or provirus titer), by about 30-50-fold, preferably by about 60-80-fold, and more preferably about (or at least) 90-fold, 100-fold, 200-fold, 300-fold, 400-fold, 500-fold or 1000-fold.

[0096] Additionally, the therapeutic agents and methods of the present invention can be used in co-therapy with post-transcriptional approaches (e.g., with ribozymes and/or antisense siRNAs).

### Dual Prophylactic and Therapeutic Methods

[0097] In a preferred method, a two-pronged attack on the target virus is effected in a subject that has been exposed to the target virus. An infected subject can thus be treated both prophylactically and therapeutically by degrading the virus during early stages of replication and prior to integration into the host cell genome, and also retards replication of the virus in cells in which the target virus has already begun to replicate.

[0098] One skilled in the art can readily determine the appropriate dose, schedule, and method of administration for the exact formulation of the composition being used, in order to achieve the desired “effective level” in the individual patient. One skilled in the art also can readily determine and use an appropriate indicator of the “effective level” of the compounds of the present invention by a direct (e.g., analytical chemical analysis) or indirect (e.g., with surrogate indicators of viral infection) analysis of appropriate patient samples (e.g., blood and/or tissues).

[0099] The prophylactic or therapeutic pharmaceutical compositions of the present invention can contain other pharmaceuticals, in conjunction with a vector according to the invention, when used to therapeutically treat viral infections. Further representative examples of these additional pharmaceuticals that can be used in addition to those previously described, include antiviral compounds, immunomodulators, immunostimulants, antibiotics, and other agents and treatment regimes (including those recognized as alternative medicine) that can be employed to treat viral infections. Immunomodulators and immunostimulants include, but are not limited to, various interleukins, CD4, cytokines, antibody preparations, blood transfusions, and cell transfusions.

### Pharmaceutical Compositions

[0100] The invention pertains to uses of the above-described RNAi-inducing entities for the prophylactic and therapeutic treatments of viral infection, as described infra. Accordingly, the agents of the present invention can be incorporated into pharmaceutical compositions suitable for administration. Such compositions typically comprise the agent and a pharmaceutically acceptable carrier.

[0101] A pharmaceutical composition of the invention is formulated to be compatible with its intended route of administration. Examples of routes of administration include oral, by inhalation, intranasal, parenteral (e.g., intravenous, intradermal, subcutaneous, intraperitoneal, and intramuscular), transdermal (topical), and transmucosal administration. Solutions or suspensions used for parenteral, intradermal, or subcutaneous application can include the following components: a sterile diluent such as water for injection, saline solution, fixed oils, polyethylene glycols, glycerine, propylene glycol or other synthetic solvents; antibacterial agents such as benzyl alcohol or methyl parabens; antioxidants such as ascorbic acid or sodium bisulfite; chelating agents such as ethylenediaminetetraacetic acid (EDTA); buffers such as acetates, citrates or phosphates and agents for the adjustment of tonicity such as sodium chloride or dextrose. pH can be adjusted with acids or bases, such as hydrochloric acid or sodium hydroxide. The parenteral preparation can be enclosed in ampoules, disposable syringes or multiple dose vials made of glass or plastic.

[0102] Pharmaceutical compositions suitable for injectable use include sterile aqueous solutions (where water soluble) or dispersions and sterile powders for the extemporaneous preparation of sterile injectable solutions or dispersion. For intravenous administration, suitable carriers include physiological saline, bacteriostatic water, Cremophor EL™ (BASF, Parsippany, N.J.) or phosphate buffered saline (PBS). In all cases, the composition must be sterile and should be fluid to the extent that easy syringability exists. It must be stable under the conditions of manufacture and storage and must be preserved against the contaminating action of microorganisms such as bacteria and fungi. The carrier can be a solvent or dispersion medium containing, for example, water, ethanol, polyol (e.g., glycerol, propylene glycol, and liquid polyetheylene glycol, and the like), and suitable mixtures thereof. The proper fluidity can be maintained, e.g., by the use of a coating such as lecithin, by the maintenance of the required particle size in the case of dispersion and by the use of surfactants. Prevention of the action of microorganisms can be achieved by various antibacterial and antifungal agents (e.g., parabens, chlorobutanol, phenol, ascorbic acid, thimerosal, and the like). In many cases, it will be preferable to include isotonic agents (e.g., sugars, polyalcohols such as manitol, sorbitol, and sodium chloride) in the composition. Prolonged absorption of the injectable compositions can be brought about by including in the composition an agent that delays absorption (e.g., aluminum monostearate and gelatin).

[0103] Sterile injectable solutions can be prepared by incorporating the active compound in the required amount in an appropriate solvent with one or a combination of ingredients enumerated above, as required, followed by filtered sterilization. Generally, dispersions are prepared by incorporating the active compound into a sterile vehicle which contains a basic dispersion medium and the required other ingredients from those enumerated above. In the case of sterile powders for the preparation of sterile injectable solutions, the preferred methods of preparation are vacuum drying and freeze-drying which yields a powder of the active ingredient plus any additional desired ingredient from a previously sterile-filtered solution thereof.

[0104] Inhalational administration means the RNAi-inducing entity is introduced directly to the respiratory system by inhalation through the nose or mouth and into the lungs. The entity is in naked form or with a delivery agent In certain embodiments the RNAi-inducing agent is administered in an amount effective to treat or prevent a condition that affects the respiratory system, such as a respiratory virus infection, while resulting in minimal absorption into the blood and thus minimal systemic delivery of the RNAi-inducing agent. In particular, the invention provides dry powder compositions containing RNAi-inducing entities that are preferably delivered in the form of an aerosol spray from a pressured container or dispenser which contains a suitable propellant, e.g., a gas such as carbon dioxide, or a nebulizer. In certain embodiments the delivery system is suitable for delivering the composition into major airways (trachea and bronchi) of a subject (e.g., an animal or human) and/or deeper into the lung (bronchioles and/or alveoli). The present invention also includes delivery of compositions comprising an RNAi-inducing entity using a nasal spray. According to certain embodiments of the invention delivery agents to facilitate nucleic acid uptake by cells in the respiratory system are included in the pharmaceutical composition. However, the inventors have also discovered that RNAi-inducing agents can effectively inhibit influenza virus when delivered to the respiratory system via the respiratory passages in the absence of specific delivery agents. For example, RNAi-inducing agents can be delivered to the lungs as a composition that consists essentially of the RNAi-inducing agent in dry form (e.g., dry powder) or in an aqueous medium that consists essentially of water, optionally also including a salt (e.g., NaCl, a phosphate salt), buffer, and/or an alcohol, e.g., as naked siRNA or shRNA.

[0105] The invention also provides means of systemic circulatory delivery of an RNAi-inducing entity by the pulmonary circulation. For a respiratory disease it is preferable to have minimal transfer to the circulation.

[0106] Oral compositions generally include an inert diluent or an edible carrier. They can be enclosed in gelatin capsules or compressed into tablets. For the purpose of oral therapeutic administration, the active compound can be incorporated with excipients and used in the form of so tablets, troches, or capsules. Oral compositions can also be prepared using a fluid carrier for use as a mouthwash, wherein the compound in the fluid carrier is applied orally and swished and expectorated or swallowed. Pharmaceutically compatible binding agents, and/or adjuvant materials can be included as part of the composition. The tablets, pills, capsules, troches and the like can contain any of the following ingredients, or compounds of a similar nature: a binder such as microcrystalline cellulose, gum tragacanth or gelatin; an excipient such as starch or lactose, a disintegrating agent such as alginic acid, Primogel, or corn starch; a lubricant such as magnesium stearate or Sterotes; a glidant such as colloidal silicon dioxide; a sweetening agent such as sucrose or saccharin; or a flavoring agent such as peppermint, methyl salicylate, or orange flavoring.

[0107] Systemic administration can also be by transmucosal or transdermal means. For transmucosal or transdermal administration, penetrants appropriate to the barrier to be permeated are used in the formulation. Such penetrants are generally known in the art, and include, for example, for transmucosal administration, detergents, bile salts, and fusidic acid derivatives. Transmucosal administration can be accomplished through the use of nasal sprays or suppositories. For transdermal administration, the active compounds are formulated into ointments, salves, gels, or creams as generally known in the art.

[0108] In one embodiment, the active compounds are prepared with carriers that will protect the compound against rapid elimination from the body, such as a controlled release formulation, including implants and microencapsulated delivery systems. Biodegradable, biocompatible polymers can be used, such as ethylene vinyl acetate, polyanhydrides, polyglycolic acid, collagen, polyorthoesters, and polylactic acid. Methods for preparation of such formulations will be apparent to those skilled in the art. The materials can also be obtained commercially from Alza Corporation and Nova Pharmaceuticals, Inc. Liposomal suspensions (including liposomes targeted to infected cells with monoclonal antibodies to viral antigens) can also be used as pharmaceutically acceptable carriers. These can be prepared according to methods known to those skilled in the art, for example, as described in U.S. Pat. No. 4,522,811.

[0109] It is especially advantageous to formulate inhalational, oral or parenteral compositions in dosage unit form for ease of administration and uniformity of dosage. Dosage unit form as used herein refers to physically discrete units suited as unitary dosages for the subject to be treated; each unit containing a predetermined quantity of active compound calculated to produce the desired therapeutic effect in association with the required pharmaceutical carrier. The specification for the dosage unit forms of the invention are dictated by and directly dependent on the unique characteristics of the active compound and the particular therapeutic effect to be achieved, and the limitations inherent in the art of compounding such an active compound for the treatment of individuals.

[0110] Toxicity and therapeutic efficacy of such compounds can be determined by standard pharmaceutical procedures in cell cultures or experimental animals, e.g., for determining the LD50 (the dose lethal to 50% of the population) and the ED50 (the dose therapeutically effective in 50% of the population). The dose ratio between toxic and therapeutic effects is the therapeutic index and it can be expressed as the ratio LD50/ED50. Compounds that exhibit large therapeutic indices are preferred. Although compounds that exhibit toxic side effects may be used, care should be taken to design a delivery system that targets such compounds to the site of affected tissue in order to minimize potential damage to uninfected cells and, thereby, reduce side effects.

[0111] The data obtained from the cell culture assays and animal studies can be used in formulating a range of dosage for use in humans. The dosage of such compounds lies preferably within a range of circulating concentrations that include the ED50 with little or no toxicity. The dosage may vary within this range depending upon the dosage form employed and the route of administration utilized. For any compound used in the method of the invention, the therapeutically effective dose can be estimated initially from cell culture or non-human animal assays. A dose may be formulated in animal models to achieve a circulating plasma concentration range that includes the EC50 (i.e., the concentration of the test compound which achieves a half-maximal response) as determined in cell culture. Such information can be used to more accurately determine useful doses in humans. Levels in plasma may be measured, for example, by high performance liquid chromatography.

[0112] The pharmaceutical compositions can be included in a container, pack, or dispenser together with instructions for administration.

[0113] All publications, references, patents, patent publications and patent applications cited herein are each hereby specifically incorporated by reference in their entirety.

[0114] While this invention has been described in relation to certain embodiments, and many details have been set forth for purposes of illustration, it will be apparent to those skilled in the art that this invention includes additional embodiments, and that some of the details described herein may be varied considerably without departing from this invention. This invention includes such additional embodiments, modifications and equivalents. In particular, this invention includes any combination of the features, terms, or elements of the various illustrative components and examples.

[0115] The use herein of the terms “a,” “an,” “the,” and similar terms in describing the invention, and in the claims, are to be construed to include both the singular and the plural. The terms “comprising,” “having,” “including,” and “containing” are to be construed as open-ended terms which mean, for example, “including, but not limited to.” Recitation of a range of values herein refers individually to each and any separate value falling within the range as if it were individually recited herein, whether or not some of the values within the range are expressly recited. Specific values employed herein will be understood as exemplary and not to limit the scope of the invention.

[0116] Definitions of technical terms provided herein should be construed to include without recitation those meanings associated with these terms known to those skilled in the art, and are not intended to limit the scope of the invention.

[0117] The examples given herein, and the exemplary language used herein are solely for the purpose of illustration, and are not intended to limit the scope of the invention.

[0118] When a list of examples is given herein, such as a list of compounds or molecules suitable for this invention, it will be apparent to those skilled in the art that mixtures of the listed compounds or molecules are also suitable.

### EXAMPLE 1

### Identification of Viral Nucleoproteins and siRNAs

[0119] Highly conserved sites are considered to be those sites or sequences that are found to be present in a high proportion of all the published human influenza sequences. A subsidiary goal was to identify 19-mer and 25-mer sequences in human influenza isolates that are similar to the highly conserved 19-mer and 25-mer sequences, but that differ by only one or a few nucleotide changes.

[0120] There are eight separate RNA segments that compose the influenza viral genome. All analyses were done separately for each of the viral segments. Thus, for example, a search for conserved sites was performed for viral segment #1 using only sequences obtained from segment #1.

[0121] Influenza A viral sequences from each of the eight viral segments was obtained from the Influenza Sequence Database (Macken, C., Lu, H., Goodman, J., & Boykin, L., “The value of a database in surveillance and vaccine selection.” in Options for the Control of Influenza IV. A. D. M. E. Osterhaus, N. Cox & A. W. Hampson (Eds.) Amsterdam: Elsevier Science, 2001, 103-106), abbreviated in this document as ISD. The list was screened to remove all but nearly full-length sequences (those with a length that is at least 90% of the longest observed length for a given segment), so that a failure to find a 19-mer or 25-mer fragment match within a given target sequence could not be ascribed to sequence truncation. Table 1 lists the accession numbers of the human influenza sequences that met the preceding criteria and that were used in the subsequent analyses. Accession numbers starting with ISDN are ISD accession numbers; all others are GenBank accession numbers, although the sequences were obtained from the ISD.

TABLE 1
1: GenBank accession numbers for PB2 sequences (segment 1) used in this
analysis.
AB036782, AB126626, AB126635, AB212050, AB212051, AB262460, AF036363, AF037412,
AF037413, AF037414, AF037415, AF037416, AF037417, AF046093, AF084261, AF084262,
AF084263, AF115290, AF115291, AF258524, AF258525, AF258835, AF258836, AF258837,
AF258838, AF258839, AF258840, AF258841, AF258842, AF258843, AF258844, AF258845,
AF258846, AF348170, AF348171, AF389115, AF398866, AF483602, AJ293920, AJ404630,
AJ404631, AJ404632, AJ564804, AJ564805, AY043030, AY209934, AY209935, AY209936,
AY209937, AY209938, AY209939, AY209940, AY209941, AY209942, AY209943, AY209944,
AY209945, AY209946, AY209947, AY209948, AY209949, AY209950, AY209951, AY210137,
AY210138, AY210139, AY210140, AY210141, AY210142, AY210143, AY210144, AY210145,
AY210146, AY210147, AY210148, AY210149, AY210150, AY576380, AY576381, AY651718,
AY651719, AY651721, AY818126, CY000008, CY000016, CY000024, CY000032, CY000040,
CY000048, CY000056, CY000064, CY000072, CY000080, CY000088, CY000096, CY000104,
CY000112, CY000120, CY000128, CY000136, CY000144, CY000152, CY000160, CY000168,
CY000176, CY000184, CY000192, CY000200, CY000208, CY000216, CY000224, CY000232,
CY000240, CY000248, CY000255, CY000264, CY000272, CY000280, CY000288, CY000296,
CY000304, CY000312, CY000320, CY000328, CY000336, CY000344, CY000352, CY000360,
CY000368, CY000376, CY000384, CY000392, CY000400, CY000408, CY000416, CY000424,
CY000432, CY000440, CY000448, CY000455, CY000464, CY000472, CY000480, CY000488,
CY000496, CY000504, CY000512, CY000519, CY000528, CY000536, CY000544, CY000552,
CY000560, CY000568, CY000576, CY000583, CY000592, CY000600, CY000608, CY000616,
CY000624, CY000632, CY000640, CY000648, CY000656, CY000664, CY000672, CY000680,
CY000688, CY000696, CY000704, CY000712, CY000720, CY000728, CY000736, CY000744,
CY000752, CY000760, CY000768, CY000776, CY000784, CY000792, CY000800, CY000808,
CY000816, CY000824, CY000832, CY000840, CY000848, CY000856, CY000864, CY000872,
CY000880, CY000888, CY000896, CY000908, CY000916, CY000924, CY000932, CY000940,
CY000948, CY000956, CY000964, CY000972, CY000980, CY000988, CY000996, CY001004,
CY001012, CY001020, CY001028, CY001036, CY001044, CY001052, CY001060, CY001071,
CY001079, CY001087, CY001095, CY001103, CY001111, CY001119, CY001127, CY001135,
CY001143, CY001151, CY001159, CY001167, CY001175, CY001183, CY001191, CY001196,
CY001204, CY001212, CY001220, CY001228, CY001236, CY001244, CY001252, CY001260,
CY001268, CY001276, CY001284, CY001292, CY001300, CY001308, CY001316, CY001324,
CY001332, CY001340, CY001348, CY001356, CY001364, CY001372, CY001380, CY001388,
CY001404, CY001412, CY001420, CY001428, CY001436, CY001444, CY001452, CY001460,
CY001468, CY001476, CY001484, CY001492, CY001500, CY001511, CY001519, CY001527,
CY001535, CY001543, CY001551, CY001559, CY001567, CY001575, CY001583, CY001591,
CY001599, CY001607, CY001615, CY001623, CY001631, CY001639, CY001647, CY001655,
CY001663, CY001671, CY001679, CY001687, CY001695, CY001703, CY001711, CY001719,
CY001727, CY001735, CY001743, CY001751, CY001759, CY001767, CY001775, CY001783,
CY001791, CY001799, CY001807, CY001815, CY001823, CY001831, CY001839, CY001847,
CY001855, CY001863, CY001871, CY001879, CY001887, CY001895, CY001903, CY001911,
CY001919, CY001927, CY001935, CY001943, CY001951, CY001959, CY001967, CY001975,
CY001983, CY001991, CY001999, CY002007, CY002015, CY002023, CY002031, CY002039,
CY002047, CY002055, CY002063, CY002071, CY002079, CY002087, CY002095, CY002103,
CY002111, CY002119, CY002127, CY002135, CY002143, CY002151, CY002159, CY002167,
CY002175, CY002183, CY002191, CY002199, CY002207, CY002215, CY002223, CY002231,
CY002239, CY002247, CY002255, CY002263, CY002271, CY002279, CY002287, CY002295,
CY002303, CY002311, CY002319, CY002335, CY002343, CY002351, CY002359, CY002367,
CY002375, CY002383, CY002391, CY002399, CY002407, CY002415, CY002423, CY002431,
CY002439, CY002447, CY002455, CY002463, CY002471, CY002479, CY002487, CY002495,
CY002503, CY002511, CY002519, CY002527, CY002535, CY002543, CY002551, CY002559,
CY002567, CY002575, CY002583, CY002591, CY002599, CY002607, CY002615, CY002623,
CY002631, CY002639, CY002647, CY002655, CY002663, CY002671, CY002679, CY002687,
CY002695, CY002703, CY002711, CY002719, CY002727, CY002735, CY002743, CY002751,
CY002759, CY002767, CY002775, CY002783, CY002791, CY002799, CY002807, CY002815,
CY002823, CY002913, CY002921, CY002929, CY002937, CY002945, CY002953, CY002961,
CY002969, CY002976, CY002983, CY002991, CY002999, CY003007, CY003015, CY003023,
CY003031, CY003039, CY003047, CY003055, CY003063, CY003071, CY003079, CY003087,
CY003095, CY003103, CY003111, CY003119, CY003132, CY003135, CY003143, CY003151,
CY003159, CY003167, CY003175, CY003183, CY003191, CY003199, CY003207, CY003215,
CY003223, CY003231, CY003239, CY003247, CY003255, CY003263, CY003271, CY003279,
CY003287, CY003295, CY003303, CY003311, CY003319, CY003327, CY003335, CY003343,
CY003351, CY003359, CY003375, CY003383, CY003391, CY003399, CY003407, CY003415,
CY003423, CY003431, CY003439, CY003447, CY003455, CY003463, CY003471, CY003479,
CY003487, CY003495, CY003503, CY003511, CY003519, CY003527, CY003535, CY003543,
CY003551, CY003559, CY003567, CY003575, CY003583, CY003591, CY003599, CY003607,
CY003615, CY003623, CY003631, CY003639, CY003647, CY003655, CY003663, CY003671,
CY003679, CY003687, CY003695, CY003703, CY003711, CY003719, CY003727, CY003735,
CY003743, CY003751, CY003759, CY003768, CY003776, CY003784, CY003792, CY003800,
CY003808, CY003816, CY003824, CY003832, CY003840, CY006051, CY006059, CY006067,
CY006075, CY006083, CY006091, CY006099, CY006106, CY006114, CY006122, CY006130,
CY006138, CY006146, CY006154, CY006162, CY006170, CY006178, CY006186, CY006194,
CY006202, CY006210, CY006218, CY006226, CY006234, CY006242, CY006250, CY006258,
CY006266, CY006274, CY006282, CY006290, CY006298, CY006306, CY006314, CY006322,
CY006330, CY006338, CY006346, CY006354, CY006362, CY006370, CY006378, CY006386,
CY006394, CY006402, CY006410, CY006418, CY006426, CY006434, CY006442, CY006450,
CY006458, CY006466, CY006474, CY006482, CY006490, CY006498, CY006506, CY006514,
CY006522, CY006530, CY006538, CY006546, CY006554, CY006562, CY006570, CY006578,
CY006586, CY006594, CY006602, CY006610, CY006618, CY006626, CY006634, CY006642,
CY006666, CY006674, CY006682, CY006690, CY006698, CY006706, CY006714, CY006722,
CY006730, CY006738, CY006746, CY006754, CY006762, CY006770, CY006778, CY006786,
CY006794, CY006802, CY006810, CY006818, CY006826, CY006834, CY006842, CY006850,
CY006858, CY006866, CY006874, CY006882, CY006890, CY006898, CY006906, CY006914,
CY006922, CY006930, CY006938, CY006946, CY006954, CY006962, CY006970, CY006978,
CY006986, CY006994, CY007002, CY007010, CY007018, CY007026, CY007034, CY007042,
CY007050, CY007058, CY007066, CY007074, CY007082, CY007090, CY007098, CY007106,
CY007114, CY007122, CY007130, CY007138, CY007146, CY007154, CY007162, CY007170,
CY007178, CY007186, CY007194, CY007202, CY007210, CY007218, CY007226, CY007234,
CY007242, CY007250, CY007258, CY007266, CY007274, CY007282, CY007290, CY007298,
CY007306, CY007314, CY007322, CY007330, CY007338, CY007346, CY007354, CY007362,
CY007370, CY007378, CY007386, CY007394, CY007402, CY007410, CY007418, CY007426,
CY007434, CY007442, CY007450, CY007458, CY007466, CY007474, CY007482, CY007490,
CY007498, CY007506, CY007514, CY007522, CY007530, CY007538, CY007546, CY007554,
CY007562, CY007570, CY007578, CY007586, CY007594, CY007602, CY007610, CY007618,
CY007626, CY007634, CY007642, CY007650, CY007658, CY007666, CY007674, CY007682,
CY007690, CY007698, CY007706, CY007714, CY007722, CY007730, CY007738, CY007746,
CY007754, CY007762, CY007770, CY007778, CY007786, CY007794, CY007802, CY007810,
CY007818, CY007826, CY007834, CY007842, CY007850, CY007858, CY007866, CY007874,
CY007882, CY007890, CY007898, CY007906, CY007914, CY007922, CY007930, CY007938,
CY007946, CY007954, CY007962, CY007970, CY007978, CY007986, CY007994, CY008002,
CY008010, CY008018, CY008026, CY008034, CY008042, CY008050, CY008058, CY008066,
CY008074, CY008082, CY008090, CY008098, CY008106, CY008114, CY008122, CY008130,
CY008138, CY008146, CY008155, CY008163, CY008171, CY008179, CY008187, CY008195,
CY008203, CY008211, CY008219, CY008227, CY008235, CY008243, CY008251, CY008259,
CY008267, CY008275, CY008283, CY008291, CY008299, CY008307, CY008315, CY008323,
CY008331, CY008339, CY008347, CY008355, CY008363, CY008371, CY008379, CY008387,
CY008395, CY008403, CY008411, CY008419, CY008427, CY008435, CY008443, CY008451,
CY008459, CY008467, CY008475, CY008483, CY008491, CY008499, CY008507, CY008515,
CY008523, CY008531, CY008539, CY008547, CY008555, CY008563, CY008571, CY008579,
CY008587, CY008595, CY008603, CY008611, CY008619, CY008627, CY008635, CY008643,
CY008651, CY008659, CY008667, CY008675, CY008683, CY008691, CY008699, CY008707,
CY008715, CY008723, CY008731, CY008739, CY008747, CY008755, CY008763, CY008771,
CY008779, CY008787, CY008795, CY008803, CY008811, CY008819, CY008827, CY008835,
CY008843, CY008851, CY008859, CY008867, CY008875, CY008883, CY008891, CY008899,
CY008907, CY008915, CY008923, CY008931, CY008939, CY008947, CY008955, CY008963,
CY008971, CY008979, CY008987, CY008995, CY009003, CY009011, CY009019, CY009027,
CY009035, CY009043, CY009051, CY009059, CY009067, CY009075, CY009083, CY009091,
CY009099, CY009107, CY009115, CY009123, CY009131, CY009139, CY009147, CY009155,
CY009163, CY009171, CY009179, CY009187, CY009195, CY009203, CY009211, CY009219,
CY009227, CY009235, CY009243, CY009251, CY009259, CY009267, CY009275, CY009283,
CY009291, CY009299, CY009323, CY009331, CY009339, CY009347, CY009355, CY009363,
CY009371, CY009395, CY009403, CY009411, CY009419, CY009427, CY009435, CY009443,
CY009451, CY009459, CY009467, CY009475, CY009483, CY009491, CY009499, CY009507,
CY009515, CY009523, CY009531, CY009539, CY009547, CY009555, CY009563, CY009571,
CY009579, CY009587, CY009595, CY009603, CY009611, CY009619, CY009627, CY009643,
CY009651, CY009659, CY009667, CY009675, CY009683, CY009691, CY009699, CY009707,
CY009715, CY009723, CY009731, CY009739, CY009747, CY009755, CY009763, CY009771,
CY009779, CY009787, CY009795, CY009803, CY009811, CY009819, CY009827, CY009835,
CY009843, CY009851, CY009859, CY009867, CY009875, CY009883, CY009891, CY009907,
CY009915, CY009931, CY009939, CY009947, CY009955, CY009963, CY009971, CY009979,
CY009987, CY009995, CY010003, CY010011, CY010019, CY010027, CY010035, CY010043,
CY010051, CY010059, CY010067, CY010075, CY010083, CY010091, CY010099, CY010107,
CY010115, CY010123, CY010131, CY010139, CY010147, CY010155, CY010163, CY010171,
CY010179, CY010187, CY010195, CY010203, CY010211, CY010219, CY010227, CY010235,
CY010243, CY010251, CY010259, CY010267, CY010275, CY010283, CY010291, CY010299,
CY010307, CY010315, CY010323, CY010331, CY010339, CY010347, CY010355, CY010363,
CY010371, CY010379, CY010387, CY010395, CY010403, CY010411, CY010419, CY010427,
CY010435, CY010443, CY010451, CY010459, CY010467, CY010475, CY010483, CY010491,
CY010499, CY010507, CY010515, CY010523, CY010531, CY010539, CY010547, CY010555,
CY010563, CY010595, CY010603, CY010611, CY010619, CY010627, CY010635, CY010643,
CY010651, CY010659, CY010667, CY010675, CY010683, CY010691, CY010699, CY010707,
CY010715, CY010723, CY010731, CY010739, CY010747, CY010755, CY010763, CY010771,
CY010779, CY010787, CY010795, CY010803, CY010811, CY010819, CY010827, CY010835,
CY010843, CY010851, CY010859, CY010867, CY010875, CY010883, CY010891, CY010899,
CY010907, CY010915, CY010923, CY010931, CY010939, CY010947, CY010955, CY010963,
CY010971, CY010979, CY010987, CY010995, CY011003, CY011011, CY011019, CY011027,
CY011071, CY011079, CY011087, CY011095, CY011127, CY011135, CY011143, CY011151,
CY011159, CY011167, CY011175, CY011183, CY011191, CY011199, CY011207, CY011215,
CY011223, CY011231, CY011239, CY011247, CY011263, CY011271, CY011279, CY011287,
CY011295, CY011303, CY011311, CY011319, CY011327, CY011335, CY011343, CY011351,
CY011359, CY011367, CY011375, CY011383, CY011391, CY011399, CY011407, CY011415,
CY011423, CY011431, CY011439, CY011447, CY011455, CY011463, CY011471, CY011479,
CY011487, CY011495, CY011503, CY011511, CY011519, CY011527, CY011535, CY011543,
CY011551, CY011559, CY011567, CY011575, CY011583, CY011591, CY011599, CY011607,
CY011615, CY011623, CY011631, CY011639, CY011647, CY011655, CY011663, CY011671,
CY011679, CY011687, CY011695, CY011703, CY011711, CY011719, CY011727, CY011735,
CY011743, CY011751, CY011759, CY011767, CY011775, CY011783, CY011791, CY011799,
CY011807, CY011815, CY011823, CY011831, CY011839, CY011847, CY011855, CY011863,
CY011871, CY011879, CY011887, CY011895, CY011903, CY011911, CY011919, CY011927,
CY011935, CY011943, CY011951, CY011959, CY011967, CY011975, CY011983, CY011991,
CY011999, CY012007, CY012015, CY012023, CY012031, CY012039, CY012047, CY012055,
CY012063, CY012071, CY012079, CY012087, CY012095, CY012103, CY012111, CY012119,
CY012127, CY012135, CY012143, CY012151, CY012159, CY012167, CY012175, CY012183,
CY012191, CY012199, CY012207, CY012215, CY012223, CY012231, CY012239, CY012247,
CY012255, CY012263, CY012271, CY012279, CY012287, CY012295, CY012303, CY012311,
CY012319, CY012327, CY012335, CY012343, CY012351, CY012359, CY012367, CY012375,
CY012383, CY012391, CY012399, CY012407, CY012415, CY012423, CY012431, CY012439,
CY012447, CY012455, CY012463, CY012471, CY012479, CY012487, CY012495, CY012503,
CY012511, CY012519, CY012527, CY012535, CY012543, CY012551, CY012559, CY012567,
CY012575, CY012583, CY012591, CY012599, CY012607, CY012615, CY012623, CY012631,
CY012639, CY012647, CY012655, CY012663, CY012671, CY012679, CY012687, CY012695,
CY012703, CY012711, CY012719, CY012727, CY012735, CY012743, CY012751, CY012759,
CY012767, CY012775, CY012783, CY012791, CY012799, CY012855, CY012863, CY012871,
CY012879, CY012887, CY012895, CY012903, CY012911, CY012919, CY012927, CY012935,
CY012943, CY012951, CY012959, CY012967, CY012975, CY012983, CY012991, CY012999,
CY013007, CY013015, CY013023, CY013031, CY013039, CY013047, CY013055, CY013063,
CY013071, CY013079, CY013087, CY013095, CY013103, CY013111, CY013119, CY013127,
CY013135, CY013143, CY013151, CY013159, CY013167, CY013175, CY013183, CY013191,
CY013199, CY013207, CY013215, CY013223, CY013231, CY013239, CY013247, CY013278,
CY013286, CY013294, CY013302, CY013310, CY013318, CY013326, CY013334, CY013342,
CY013350, CY013358, CY013366, CY013374, CY013382, CY013396, CY013404, CY013412,
CY013420, CY013428, CY013436, CY013444, CY013452, CY013460, CY013468, CY013476,
CY013484, CY013492, CY013500, CY013508, CY013516, CY013524, CY013532, CY013540,
CY013548, CY013556, CY013564, CY013572, CY013580, CY013588, CY013596, CY013604,
CY013612, CY013620, CY013628, CY013636, CY013644, CY013652, CY013660, CY013668,
CY013676, CY013684, CY013692, CY013700, CY013708, CY013716, CY013724, CY013732,
CY013740, CY013748, CY013756, CY013764, CY013772, CY013780, CY013788, CY013796,
CY013804, CY013812, CY013820, CY013828, CY013836, CY013844, CY013852, CY013860,
CY013862, CY013878, CY013886, CY013894, CY013902, CY013910, CY013918, CY013926,
CY013934, CY013942, CY013950, CY013958, CY013966, CY013974, CY013982, CY013990,
CY013998, CY014006, CY014014, CY014022, CY014030, CY014038, CY014046, CY014054,
CY014062, CY014070, CY014078, CY014086, CY014094, CY014102, CY014110, CY014118,
CY014126, CY014134, CY014142, CY014150, CY014158, CY014166, CY014167, CY014175,
CY014269, CY014277, CY014285, CY014293, CY014308, CY014320, CY014322, CY014325,
CY014329, CY014332, CY014333, CY014337, CY014341, CY014344, CY014346, CY014348,
CY014352, CY014356, CY014359, CY014360, CY014364, CY014367, CY014375, CY014383,
CY014391, CY014392, CY014396, CY014404, CY014412, CY014420, CY014428, CY014436,
CY014444, CY014452, CY014460, CY014468, CY014476, CY014484, CY014492, CY014500,
CY014512, CY014520, CY014526, CY014534, CY014983, CY015013, CY015515, CY015523,
CY015531, CY015539, CY015547, CY015555, CY015563, CY015571, CY015579, CY015587,
CY015595, CY015603, CY015611, CY015619, CY015627, CY015635, CY015643, CY015651,
CY015659, CY015667, CY015675, CY015683, CY015691, CY015699, CY015707, CY015715,
CY015723, CY015731, CY015739, CY015747, CY015755, CY015763, CY015771, CY015779,
CY015787, CY015795, CY015803, CY015811, CY015819, CY015827, CY015835, CY015843,
CY015851, CY015859, CY015867, CY015875, CY015883, CY015891, CY015899, CY015907,
CY015915, CY015923, CY015931, CY015939, CY015947, CY015955, CY015963, CY015971,
CY015979, CY015987, CY015995, CY016003, CY016011, CY016019, CY016027, CY016035,
CY016043, CY016051, CY016059, CY016067, CY016075, CY016083, CY016091, CY016099,
CY016107, CY016115, CY016123, CY016203, CY016211, CY016219, CY016235, CY016243,
CY016251, CY016259, CY016267, CY016275, CY016410, CY016434, CY016442, CY016450,
CY016458, CY016466, CY016474, CY016482, CY016490, CY016498, CY016506, CY016514,
CY016522, CY016530, CY016538, CY016546, CY016554, CY016562, CY016570, CY016578,
CY016586, CY016594, CY016602, CY016610, CY016634, CY016642, CY016650, CY016658,
CY016666, CY016674, CY016682, CY016690, CY016698, CY016706, CY016714, CY016722,
CY016730, CY016738, CY016746, CY016754, CY016762, CY016770, CY016778, CY016970,
CY016978, CY016986, CY016994, CY017002, CY017010, CY017018, CY017026, CY017090,
CY017098, CY017106, CY017114, CY017122, CY017130, CY017138, CY017146, CY017154,
CY017162, CY017170, CY017178, CY017202, CY017210, CY017218, CY017226, CY017234,
CY017242, CY017250, CY017258, CY017266, CY017274, CY017290, CY017298, CY017306,
CY017314, CY017322, CY017330, CY017338, CY017346, CY017354, CY017362, CY017370,
CY017378, CY017386, CY017394, CY017402, CY017426, CY017434, CY017442, CY017450,
CY017458, CY017466, CY017474, CY017482, CY017490, CY017498, CY017506, CY017514,
CY017522, CY017530, CY017538, CY017546, CY017554, CY017562, CY017570, CY017578,
CY017586, CY017594, CY017602, CY017610, CY017618, CY017626, CY017634, CY017635,
CY017643, CY017651, CY017659, CY017667, CY017675, CY017683, CY017685, DQ138181,
DQ208309, DQ226172, DQ249263, DQ360837, DQ372598, DQ415283, DQ415284, DQ415285,
DQ415286, DQ415287, DQ415288, DQ415289, DQ415290, DQ415291, DQ415292, DQ415293,
DQ469955, DQ486029, DQ487334, DQ492894, DQ492896, DQ492900, DQ492902, DQ508822,
DQ508830, DQ508838, DQ508846, DQ508854, DQ508862, DQ508870, DQ508878, DQ508886,
DQ508894, DQ508902, DQ508926, DQ535731, DQ643811, EF101747, EF101754,
ISDN125790, ISDN125870, ISDN128033, ISDN129529, ISDN129579, ISDN130372,
ISDN130380, ISDN132413, ISDN132421, ISDN133103, ISDN133322, ISDN133329,
ISDN133363, ISDN133371, ISDN133377, ISDN13419, ISDN136848, ISDN136856,
ISDN138755, ISDN138771, ISDN138779, ISDN140026, ISDN140027, ISDN140028,
ISDN140029, ISDN140030, ISDN140031, ISDN140817, ISDN140825, ISDN140832,
ISDN140840, ISDN140848, ISDN140856, ISDN140915, ISDN140916, ISDN140917,
ISDN140933, ISDN181362, ISDN183249, ISDN183251, ISDN183254, ISDN183258,
ISDN183261, ISDN183262, ISDN183266, ISDN183270, ISDN183273, ISDN183275,
ISDN183277, ISDN183281, ISDN183285, ISDN183288, ISDN183289, ISDN183293,
ISDN183296, ISDN183304, ISDN183312, ISDN183320, ISDN183321, ISDN183701,
ISDN183709, ISDN183717, ISDN183725, ISDN183733, ISDN183741, ISDN183749,
ISDN183757, ISDN183765, ISDN183773, ISDN183781, ISDN185505, ISDN187428,
ISDN187436, ISDN187444, ISDN187452, ISDN187460, ISDN204136, ISDN204144,
ISDN204152, ISDN207105, ISDN207113, ISDN40379, ISDN40380, ISDN40383, ISDN49457,
J02140, J02179, M23970, M38277, M73517, M73521, M73524, M81575, M81581, M81587,
M91712, M91713, NC_002023, U62543, U71132, U71133, U71134, U71135, X15283, X99035,
X99036
2: GenBank and LANL accession numbers for PB1 sequences (segment 2) used in this
analysis.
AB036782, AB126626, AB126635, AB212050, AB212051, AB262460, AF036363, AF037412,
AF037413, AF037414, AF037415, AF037416, AF037417, AF046093, AF084261, AF084262,
AF084263, AF115290, AF115291, AF258524, AF258525, AF258835, AF258836, AF258837,
AF258838, AF258839, AF258840, AF258841, AF258842, AF258843, AF258844, AF258845,
AF258846, AF348170, AF348171, AF389115, AF398866, AF483602, AJ293920, AJ404630,
AJ404631, AJ404632, AJ564804, AJ564805, AY043030, AY209934, AY209935, AY209936,
AY209937, AY209938, AY209939, AY209940, AY209941, AY209942, AY209943, AY209944,
AY209945, AY209946, AY209947, AY209948, AY209949, AY209950, AY209951, AY210137,
AY210138, AY210139, AY210140, AY210141, AY210142, AY210143, AY210144, AY210145,
AY210146, AY210147, AY210148, AY210149, AY210150, AY576380, AY576381, AY651718,
AY651719, AY651721, AY818126, CY000008, CY000016, CY000024, CY000032, CY000040,
CY000048, CY000056, CY000064, CY000072, CY000080, CY000088, CY000096, CY000104,
CY000112, CY000120, CY000128, CY000136, CY000144, CY000152, CY000160, CY000168,
CY000176, CY000184, CY000192, CY000200, CY000208, CY000216, CY000224, CY000232,
CY000240, CY000248, CY000255, CY000264, CY000272, CY000280, CY000288, CY000296,
CY000304, CY000312, CY000320, CY000328, CY000336, CY000344, CY000352, CY000360,
CY000368, CY000376, CY000384, CY000392, CY000400, CY000408, CY000416, CY000424,
CY000432, CY000440, CY000448, CY000455, CY000464, CY000472, CY000480, CY000488,
CY000496, CY000504, CY000512, CY000519, CY000528, CY000536, CY000544, CY000552,
CY000560, CY000568, CY000576, CY000583, CY000592, CY000600, CY000608, CY000616,
CY000624, CY000632, CY000640, CY000648, CY000656, CY000664, CY000672, CY000680,
CY000688, CY000696, CY000704, CY000712, CY000720, CY000728, CY000736, CY000744,
CY000752, CY000760, CY000768, CY000776, CY000784, CY000792, CY000800, CY000808,
CY000816, CY000824, CY000832, CY000840, CY000848, CY000856, CY000864, CY000872,
CY000880, CY000888, CY000896, CY000908, CY000916, CY000924, CY000932, CY000940,
CY000948, CY000956, CY000964, CY000972, CY000980, CY000988, CY000996, CY001004,
CY001012, CY001020, CY001028, CY001036, CY001044, CY001052, CY001060, CY001071,
CY001079, CY001087, CY001095, CY001103, CY001111, CY001119, CY001127, CY001135,
CY001143, CY001151, CY001159, CY001167, CY001175, CY001183, CY001191, CY001196,
CY001204, CY001212, CY001220, CY001228, CY001236, CY001244, CY001252, CY001260,
CY001268, CY001276, CY001284, CY001292, CY001300, CY001308, CY001316, CY001324,
CY001332, CY001340, CY001348, CY001356, CY001364, CY001372, CY001380, CY001388,
CY001404, CY001412, CY001420, CY001428, CY001436, CY001444, CY001452, CY001460,
CY001468, CY001476, CY001484, CY001492, CY001500, CY001511, CY001519, CY001527,
CY001535, CY001543, CY001551, CY001559, CY001567, CY001575, CY001583, CY001591,
CY001599, CY001607, CY001615, CY001623, CY001631, CY001639, CY001647, CY001655,
CY001663, CY001671, CY001679, CY001687, CY001695, CY001703, CY001711, CY001719,
CY001727, CY001735, CY001743, CY001751, CY001759, CY001767, CY001775, CY001783,
CY001791, CY001799, CY001807, CY001815, CY001823, CY001831, CY001839, CY001847,
CY001855, CY001863, CY001871, CY001879, CY001887, CY001895, CY001903, CY001911,
CY001919, CY001927, CY001935, CY001943, CY001951, CY001959, CY001967, CY001975,
CY001983, CY001991, CY001999, CY002007, CY002015, CY002023, CY002031, CY002039,
CY002047, CY002055, CY002063, CY002071, CY002079, CY002087, CY002095, CY002103,
CY002111, CY002119, CY002127, CY002135, CY002143, CY002151, CY002159, CY002167,
CY002175, CY002183, CY002191, CY002199, CY002207, CY002215, CY002223, CY002231,
CY002239, CY002247, CY002255, CY002263, CY002271, CY002279, CY002287, CY002295,
CY002303, CY002311, CY002319, CY002335, CY002343, CY002351, CY002359, CY002367,
CY002375, CY002383, CY002391, CY002399, CY002407, CY002415, CY002423, CY002431,
CY002439, CY002447, CY002455, CY002463, CY002471, CY002479, CY002487, CY002495,
CY002503, CY002511, CY002519, CY002527, CY002535, CY002543, CY002551, CY002559,
CY002567, CY002575, CY002583, CY002591, CY002599, CY002607, CY002615, CY002623,
CY002631, CY002639, CY002647, CY002655, CY002663, CY002671, CY002679, CY002687,
CY002695, CY002703, CY002711, CY002719, CY002727, CY002735, CY002743, CY002751,
CY002759, CY002767, CY002775, CY002783, CY002791, CY002799, CY002807, CY002815,
CY002823, CY002913, CY002921, CY002929, CY002937, CY002945, CY002953, CY002961,
CY002969, CY002976, CY002983, CY002991, CY002999, CY003007, CY003015, CY003023,
CY003031, CY003039, CY003047, CY003055, CY003063, CY003071, CY003079, CY003087,
CY003095, CY003103, CY003111, CY003119, CY003132, CY003135, CY003143, CY003151,
CY003159, CY003167, CY003175, CY003183, CY003191, CY003199, CY003207, CY003215,
CY003223, CY003231, CY003239, CY003247, CY003255, CY003263, CY003271, CY003279,
CY003287, CY003295, CY003303, CY003311, CY003319, CY003327, CY003335, CY003343,
CY003351, CY003359, CY003375, CY003383, CY003391, CY003399, CY003407, CY003415,
CY003423, CY003431, CY003439, CY003447, CY003455, CY003463, CY003471, CY003479,
CY003487, CY003495, CY003503, CY003511, CY003519, CY003527, CY003535, CY003543,
CY003551, CY003559, CY003567, CY003575, CY003583, CY003591, CY003599, CY003607,
CY003615, CY003623, CY003631, CY003639, CY003647, CY003655, CY003663, CY003671,
CY003679, CY003687, CY003695, CY003703, CY003711, CY003719, CY003727, CY003735,
CY003743, CY003751, CY003759, CY003768, CY003776, CY003784, CY003792, CY003800,
CY003808, CY003816, CY003824, CY003832, CY003840, CY006051, CY006059, CY006067,
CY006075, CY006083, CY006091, CY006099, CY006106, CY006114, CY006122, CY006130,
CY006138, CY006146, CY006154, CY006162, CY006170, CY006178, CY006186, CY006194,
CY006202, CY006210, CY006218, CY006226, CY006234, CY006242, CY006250, CY006258,
CY006266, CY006274, CY006282, CY006290, CY006298, CY006306, CY006314, CY006322,
CY006330, CY006338, CY006346, CY006354, CY006362, CY006370, CY006378, CY006386,
CY006394, CY006402, CY006410, CY006418, CY006426, CY006434, CY006442, CY006450,
CY006458, CY006466, CY006474, CY006482, CY006490, CY006498, CY006506, CY006514,
CY006522, CY006530, CY006538, CY006546, CY006554, CY006562, CY006570, CY006578,
CY006586, CY006594, CY006602, CY006610, CY006618, CY006626, CY006634, CY006642,
CY006666, CY006674, CY006682, CY006690, CY006698, CY006706, CY006714, CY006722,
CY006730, CY006738, CY006746, CY006754, CY006762, CY006770, CY006778, CY006786,
CY006794, CY006802, CY006810, CY006818, CY006826, CY006834, CY006842, CY006850,
CY006858, CY006866, CY006874, CY006882, CY006890, CY006898, CY006906, CY006914,
CY006922, CY006930, CY006938, CY006946, CY006954, CY006962, CY006970, CY006978,
CY006986, CY006994, CY007002, CY007010, CY007018, CY007026, CY007034, CY007042,
CY007050, CY007058, CY007066, CY007074, CY007082, CY007090, CY007098, CY007106,
CY007114, CY007122, CY007130, CY007138, CY007146, CY007154, CY007162, CY007170,
CY007178, CY007186, CY007194, CY007202, CY007210, CY007218, CY007226, CY007234,
CY007242, CY007250, CY007258, CY007266, CY007274, CY007282, CY007290, CY007298,
CY007306, CY007314, CY007322, CY007330, CY007338, CY007346, CY007354, CY007362,
CY007370, CY007378, CY007386, CY007394, CY007402, CY007410, CY007418, CY007426,
CY007434, CY007442, CY007450, CY007458, CY007466, CY007474, CY007482, CY007490,
CY007498, CY007506, CY007514, CY007522, CY007530, CY007538, CY007546, CY007554,
CY007562, CY007570, CY007578, CY007586, CY007594, CY007602, CY007610, CY007618,
CY007626, CY007634, CY007642, CY007650, CY007658, CY007666, CY007674, CY007682,
CY007690, CY007698, CY007706, CY007714, CY007722, CY007730, CY007738, CY007746,
CY007754, CY007762, CY007770, CY007778, CY007786, CY007794, CY007802, CY007810,
CY007818, CY007826, CY007834, CY007842, CY007850, CY007858, CY007866, CY007874,
CY007882, CY007890, CY007898, CY007906, CY007914, CY007922, CY007930, CY007938,
CY007946, CY007954, CY007962, CY007970, CY007978, CY007986, CY007994, CY008002,
CY008010, CY008018, CY008026, CY008034, CY008042, CY008050, CY008058, CY008066,
CY008074, CY008082, CY008090, CY008098, CY008106, CY008114, CY008122, CY008130,
CY008138, CY008146, CY008155, CY008163, CY008171, CY008179, CY008187, CY008195,
CY008203, CY008211, CY008219, CY008227, CY008235, CY008243, CY008251, CY008259,
CY008267, CY008275, CY008283, CY008291, CY008299, CY008307, CY008315, CY008323,
CY008331, CY008339, CY008347, CY008355, CY008363, CY008371, CY008379, CY008387,
CY008395, CY008403, CY008411, CY008419, CY008427, CY008435, CY008443, CY008451,
CY008459, CY008467, CY008475, CY008483, CY008491, CY008499, CY008507, CY008515,
CY008523, CY008531, CY008539, CY008547, CY008555, CY008563, CY008571, CY008579,
CY008587, CY008595, CY008603, CY008611, CY008619, CY008627, CY008635, CY008643,
CY008651, CY008659, CY008667, CY008675, CY008683, CY008691, CY008699, CY008707,
CY008715, CY008723, CY008731, CY008739, CY008747, CY008755, CY008763, CY008771,
CY008779, CY008787, CY008795, CY008803, CY008811, CY008819, CY008827, CY008835,
CY008843, CY008851, CY008859, CY008867, CY008875, CY008883, CY008891, CY008899,
CY008907, CY008915, CY008923, CY008931, CY008939, CY008947, CY008955, CY008963,
CY008971, CY008979, CY008987, CY008995, CY009003, CY009011, CY009019, CY009027,
CY009035, CY009043, CY009051, CY009059, CY009067, CY009075, CY009083, CY009091,
CY009099, CY009107, CY009115, CY009123, CY009131, CY009139, CY009147, CY009155,
CY009163, CY009171, CY009179, CY009187, CY009195, CY009203, CY009211, CY009219,
CY009227, CY009235, CY009243, CY009251, CY009259, CY009267, CY009275, CY009283,
CY009291, CY009299, CY009323, CY009331, CY009339, CY009347, CY009355, CY009363,
CY009371, CY009395, CY009403, CY009411, CY009419, CY009427, CY009435, CY009443,
CY009451, CY009459, CY009467, CY009475, CY009483, CY009491, CY009499, CY009507,
CY009515, CY009523, CY009531, CY009539, CY009547, CY009555, CY009563, CY009571,
CY009579, CY009587, CY009595, CY009603, CY009611, CY009619, CY009627, CY009643,
CY009651, CY009659, CY009667, CY009675, CY009683, CY009691, CY009699, CY009707,
CY009715, CY009723, CY009731, CY009739, CY009747, CY009755, CY009763, CY009771,
CY009779, CY009787, CY009795, CY009803, CY009811, CY009819, CY009827, CY009835,
CY009843, CY009851, CY009859, CY009867, CY009875, CY009883, CY009891, CY009907,
CY009915, CY009931, CY009939, CY009947, CY009955, CY009963, CY009971, CY009979,
CY009987, CY009995, CY010003, CY010011, CY010019, CY010027, CY010035, CY010043,
CY010051, CY010059, CY010067, CY010075, CY010083, CY010091, CY010099, CY010107,
CY010115, CY010123, CY010131, CY010139, CY010147, CY010155, CY010163, CY010171,
CY010179, CY010187, CY010195, CY010203, CY010211, CY010219, CY010227, CY010235,
CY010243, CY010251, CY010259, CY010267, CY010275, CY010283, CY010291, CY010299,
CY010307, CY010315, CY010323, CY010331, CY010339, CY010347, CY010355, CY010363,
CY010371, CY010379, CY010387, CY010395, CY010403, CY010411, CY010419, CY010427,
CY010435, CY010443, CY010451, CY010459, CY010467, CY010475, CY010483, CY010491,
CY010499, CY010507, CY010515, CY010523, CY010531, CY010539, CY010547, CY010555,
CY010563, CY010595, CY010603, CY010611, CY010619, CY010627, CY010635, CY010643,
CY010651, CY010659, CY010667, CY010675, CY010683, CY010691, CY010699, CY010707,
CY010715, CY010723, CY010731, CY010739, CY010747, CY010755, CY010763, CY010771,
CY010779, CY010787, CY010795, CY010803, CY010811, CY010819, CY010827, CY010835,
CY010843, CY010851, CY010859, CY010867, CY010875, CY010883, CY010891, CY010899,
CY010907, CY010915, CY010923, CY010931, CY010939, CY010947, CY010955, CY010963,
CY010971, CY010979, CY010987, CY010995, CY011003, CY011011, CY011019, CY011027,
CY011071, CY011079, CY011087, CY011095, CY011127, CY011135, CY011143, CY011151,
CY011159, CY011167, CY011175, CY011183, CY011191, CY011199, CY011207, CY011215,
CY011223, CY011231, CY011239, CY011247, CY011263, CY011271, CY011279, CY011287,
CY011295, CY011303, CY011311, CY011319, CY011327, CY011335, CY011343, CY011351,
CY011359, CY011367, CY011375, CY011383, CY011391, CY011399, CY011407, CY011415,
CY011423, CY011431, CY011439, CY011447, CY011455, CY011463, CY011471, CY011479,
CY011487, CY011495, CY011503, CY011511, CY011519, CY011527, CY011535, CY011543,
CY011551, CY011559, CY011567, CY011575, CY011583, CY011591, CY011599, CY011607,
CY011615, CY011623, CY011631, CY011639, CY011647, CY011655, CY011663, CY011671,
CY011679, CY011687, CY011695, CY011703, CY011711, CY011719, CY011727, CY011735,
CY011743, CY011751, CY011759, CY011767, CY011775, CY011783, CY011791, CY011799,
CY011807, CY011815, CY011823, CY011831, CY011839, CY011847, CY011855, CY011863,
CY011871, CY011879, CY011887, CY011895, CY011903, CY011911, CY011919, CY011927,
CY011935, CY011943, CY011951, CY011959, CY011967, CY011975, CY011983, CY011991,
CY011999, CY012007, CY012015, CY012023, CY012031, CY012039, CY012047, CY012055,
CY012063, CY012071, CY012079, CY012087, CY012095, CY012103, CY012111, CY012119,
CY012127, CY012135, CY012143, CY012151, CY012159, CY012167, CY012175, CY012183,
CY012191, CY012199, CY012207, CY012215, CY012223, CY012231, CY012239, CY012247,
CY012255, CY012263, CY012271, CY012279, CY012287, CY012295, CY012303, CY012311,
CY012319, CY012327, CY012335, CY012343, CY012351, CY012359, CY012367, CY012375,
CY012383, CY012391, CY012399, CY012407, CY012415, CY012423, CY012431, CY012439,
CY012447, CY012455, CY012463, CY012471, CY012479, CY012487, CY012495, CY012503,
CY012511, CY012519, CY012527, CY012535, CY012543, CY012551, CY012559, CY012567,
CY012575, CY012583, CY012591, CY012599, CY012607, CY012615, CY012623, CY012631,
CY012639, CY012647, CY012655, CY012663, CY012671, CY012679, CY012687, CY012695,
CY012703, CY012711, CY012719, CY012727, CY012735, CY012743, CY012751, CY012759,
CY012767, CY012775, CY012783, CY012791, CY012799, CY012855, CY012863, CY012871,
CY012879, CY012887, CY012895, CY012903, CY012911, CY012919, CY012927, CY012935,
CY012943, CY012951, CY012959, CY012967, CY012975, CY012983, CY012991, CY012999,
CY013007, CY013015, CY013023, CY013031, CY013039, CY013047, CY013055, CY013063,
CY013071, CY013079, CY013087, CY013095, CY013103, CY013111, CY013119, CY013127,
CY013135, CY013143, CY013151, CY013159, CY013167, CY013175, CY013183, CY013191,
CY013199, CY013207, CY013215, CY013223, CY013231, CY013239, CY013247, CY013278,
CY013286, CY013294, CY013302, CY013310, CY013318, CY013326, CY013334, CY013342,
CY013350, CY013358, CY013366, CY013374, CY013382, CY013396, CY013404, CY013412,
CY013420, CY013428, CY013436, CY013444, CY013452, CY013460, CY013468, CY013476,
CY013484, CY013492, CY013500, CY013508, CY013516, CY013524, CY013532, CY013540,
CY013548, CY013556, CY013564, CY013572, CY013580, CY013588, CY013596, CY013604,
CY013612, CY013620, CY013628, CY013636, CY013644, CY013652, CY013660, CY013668,
CY013676, CY013684, CY013692, CY013700, CY013708, CY013716, CY013724, CY013732,
CY013740, CY013748, CY013756, CY013764, CY013772, CY013780, CY013788, CY013796,
CY013804, CY013812, CY013820, CY013828, CY013836, CY013844, CY013852, CY013860,
CY013862, CY013878, CY013886, CY013894, CY013902, CY013910, CY013918, CY013926,
CY013934, CY013942, CY013950, CY013958, CY013966, CY013974, CY013982, CY013990,
CY013998, CY014006, CY014014, CY014022, CY014030, CY014038, CY014046, CY014054,
CY014062, CY014070, CY014078, CY014086, CY014094, CY014102, CY014110, CY014118,
CY014126, CY014134, CY014142, CY014150, CY014158, CY014166, CY014167, CY014175,
CY014269, CY014277, CY014285, CY014293, CY014308, CY014320, CY014322, CY014325,
CY014329, CY014332, CY014333, CY014337, CY014341, CY014344, CY014346, CY014348,
CY014352, CY014356, CY014359, CY014360, CY014364, CY014367, CY014375, CY014383,
CY014391, CY014392, CY014396, CY014404, CY014412, CY014420, CY014428, CY014436,
CY014444, CY014452, CY014460, CY014468, CY014476, CY014484, CY014492, CY014500,
CY014512, CY014520, CY014526, CY014534, CY014983, CY015013, CY015515, CY015523,
CY015531, CY015539, CY015547, CY015555, CY015563, CY015571, CY015579, CY015587,
CY015595, CY015603, CY015611, CY015619, CY015627, CY015635, CY015643, CY015651,
CY015659, CY015667, CY015675, CY015683, CY015691, CY015699, CY015707, CY015715,
CY015723, CY015731, CY015739, CY015747, CY015755, CY015763, CY015771, CY015779,
CY015787, CY015795, CY015803, CY015811, CY015819, CY015827, CY015835, CY015843,
CY015851, CY015859, CY015867, CY015875, CY015883, CY015891, CY015899, CY015907,
CY015915, CY015923, CY015931, CY015939, CY015947, CY015955, CY015963, CY015971,
CY015979, CY015987, CY015995, CY016003, CY016011, CY016019, CY016027, CY016035,
CY016043, CY016051, CY016059, CY016067, CY016075, CY016083, CY016091, CY016099,
CY016107, CY016115, CY016123, CY016203, CY016211, CY016219, CY016235, CY016243,
CY016251, CY016259, CY016267, CY016275, CY016410, CY016434, CY016442, CY016450,
CY016458, CY016466, CY016474, CY016482, CY016490, CY016498, CY016506, CY016514,
CY016522, CY016530, CY016538, CY016546, CY016554, CY016562, CY016570, CY016578,
CY016586, CY016594, CY016602, CY016610, CY016634, CY016642, CY016650, CY016658,
CY016666, CY016674, CY016682, CY016690, CY016698, CY016706, CY016714, CY016722,
CY016730, CY016738, CY016746, CY016754, CY016762, CY016770, CY016778, CY016970,
CY016978, CY016986, CY016994, CY017002, CY017010, CY017018, CY017026, CY017090,
CY017098, CY017106, CY017114, CY017122, CY017130, CY017138, CY017146, CY017154,
CY017162, CY017170, CY017178, CY017202, CY017210, CY017218, CY017226, CY017234,
CY017242, CY017250, CY017258, CY017266, CY017274, CY017290, CY017298, CY017306,
CY017314, CY017322, CY017330, CY017338, CY017346, CY017354, CY017362, CY017370,
CY017378, CY017386, CY017394, CY017402, CY017426, CY017434, CY017442, CY017450,
CY017458, CY017466, CY017474, CY017482, CY017490, CY017498, CY017506, CY017514,
CY017522, CY017530, CY017538, CY017546, CY017554, CY017562, CY017570, CY017578,
CY017586, CY017594, CY017602, CY017610, CY017618, CY017626, CY017634, CY017635,
CY017643, CY017651, CY017659, CY017667, CY017675, CY017683, CY017685, DQ138181,
DQ208309, DQ226172, DQ249263, DQ360837, DQ372598, DQ415283, DQ415284, DQ415285,
DQ415286, DQ415287, DQ415288, DQ415289, DQ415290, DQ415291, DQ415292, DQ415293,
DQ469955, DQ486029, DQ487334, DQ492894, DQ492896, DQ492900, DQ492902, DQ508822,
DQ508830, DQ508838, DQ508846, DQ508854, DQ508862, DQ508870, DQ508878, DQ508886,
DQ508894, DQ508902, DQ508926, DQ535731, DQ643811, EF101747, EF101754,
ISDN125790, ISDN125870, ISDN128033, ISDN129529, ISDN129579, ISDN130372,
ISDN130380, ISDN132413, ISDN132421, ISDN133103, ISDN133322, ISDN133329,
ISDN133363, ISDN133371, ISDN133377, ISDN13419, ISDN136848, ISDN136856,
ISDN138755, ISDN138771, ISDN138779, ISDN140026, ISDN140027, ISDN140028,
ISDN140029, ISDN140030, ISDN140031, ISDN140817, ISDN140825, ISDN140832,
ISDN140840, ISDN140848, ISDN140856, ISDN140915, ISDN140916, ISDN140917,
ISDN140933, ISDN181362, ISDN183249, ISDN183251, ISDN183254, ISDN183258,
ISDN183261, ISDN183262, ISDN183266, ISDN183270, ISDN183273, ISDN183275,
ISDN183277, ISDN183281, ISDN183285, ISDN183288, ISDN183289, ISDN183293,
ISDN183296, ISDN183304, ISDN183312, ISDN183320, ISDN183321, ISDN183701,
ISDN183709, ISDN183717, ISDN183725, ISDN183733, ISDN183741, ISDN183749,
ISDN183757, ISDN183765, ISDN183773, ISDN183781, ISDN185505, ISDN187428,
ISDN187436, ISDN187444, ISDN187452, ISDN187460, ISDN204136, ISDN204144,
ISDN204152, ISDN207105, ISDN207113, ISDN40379, ISDN40380, ISDN40383, ISDN49457,
J02140, J02179, M23970, M38277, M73517, M73521, M73524, M81575, M81581, M81587,
M91712, M91713, NC_002023, U62543, U71132, U71133, U71134, U71135, X15283, X99035,
X99036
3: GenBank and LANL accession numbers for PA sequences (segment 3) used in this
analysis.
AB036780, AB126627, AB126633, AB212053, AB262462, AF037424, AF037425, AF037426,
AF037427, AF037428, AF037429, AF046095, AF084267, AF084268, AF084269, AF084270,
AF115294, AF115295, AF257191, AF257192, AF257193, AF257194, AF257195, AF257196,
AF257197, AF257198, AF257199, AF257200, AF257201, AF257202, AF258518, AF258519,
AF348174, AF348175, AF389117, AF398862, AF398863, AF398864, AF483603, AJ238020,
AJ289874, AJ291402, AJ293922, AJ404637, AJ605762, AJ605763, AY043028, AY209990,
AY209991, AY209992, AY209993, AY209994, AY209995, AY209996, AY209997, AY209998,
AY209999, AY210000, AY210001, AY210002, AY210003, AY210004, AY210005, AY210006,
AY210007, AY210193, AY210194, AY210195, AY210196, AY210197, AY210198, AY210199,
AY210200, AY210201, AY210202, AY210203, AY210204, AY210205, AY210206, AY576404,
AY576405, AY651610, AY651611, AY651612, AY651613, AY818132, CY000006, CY000014,
CY000022, CY000030, CY000038, CY000046, CY000054, CY000062, CY000070, CY000078,
CY000086, CY000094, CY000102, CY000110, CY000118, CY000126, CY000134, CY000142,
CY000150, CY000158, CY000166, CY000174, CY000182, CY000190, CY000198, CY000206,
CY000214, CY000222, CY000230, CY000238, CY000246, CY000254, CY000262, CY000270,
CY000278, CY000286, CY000294, CY000302, CY000310, CY000318, CY000326, CY000334,
CY000342, CY000350, CY000358, CY000366, CY000374, CY000382, CY000390, CY000398,
CY000406, CY000414, CY000422, CY000430, CY000438, CY000446, CY000454, CY000462,
CY000470, CY000478, CY000486, CY000494, CY000502, CY000510, CY000517, CY000526,
CY000534, CY000542, CY000550, CY000558, CY000566, CY000574, CY000581, CY000590,
CY000598, CY000606, CY000614, CY000622, CY000630, CY000638, CY000646, CY000654,
CY000662, CY000670, CY000678, CY000686, CY000694, CY000702, CY000710, CY000718,
CY000726, CY000734, CY000742, CY000750, CY000758, CY000766, CY000774, CY000782,
CY000790, CY000798, CY000806, CY000814, CY000822, CY000830, CY000838, CY000846,
CY000854, CY000862, CY000870, CY000878, CY000886, CY000894, CY000906, CY000914,
CY000922, CY000930, CY000938, CY000946, CY000954, CY000962, CY000970, CY000978,
CY000986, CY000994, CY001002, CY001010, CY001018, CY001026, CY001034, CY001042,
CY001050, CY001058, CY001069, CY001077, CY001085, CY001093, CY001101, CY001109,
CY001117, CY001125, CY001133, CY001141, CY001149, CY001157, CY001165, CY001173,
CY001181, CY001189, CY001194, CY001202, CY001210, CY001218, CY001226, CY001234,
CY001242, CY001250, CY001258, CY001266, CY001274, CY001282, CY001290, CY001298,
CY001306, CY001314, CY001322, CY001330, CY001338, CY001346, CY001354, CY001362,
CY001370, CY001378, CY001386, CY001402, CY001410, CY001418, CY001426, CY001434,
CY001442, CY001450, CY001458, CY001466, CY001474, CY001482, CY001490, CY001498,
CY001509, CY001517, CY001525, CY001533, CY001541, CY001549, CY001557, CY001565,
CY001573, CY001581, CY001589, CY001597, CY001605, CY001613, CY001621, CY001629,
CY001637, CY001645, CY001653, CY001661, CY001669, CY001677, CY001685, CY001693,
CY001701, CY001709, CY001717, CY001725, CY001733, CY001741, CY001749, CY001757,
CY001765, CY001773, CY001781, CY001789, CY001797, CY001805, CY001813, CY001821,
CY001829, CY001837, CY001845, CY001853, CY001861, CY001869, CY001877, CY001885,
CY001893, CY001901, CY001909, CY001917, CY001925, CY001933, CY001941, CY001949,
CY001957, CY001965, CY001973, CY001981, CY001989, CY001997, CY002005, CY002013,
CY002021, CY002029, CY002037, CY002045, CY002053, CY002061, CY002069, CY002077,
CY002085, CY002093, CY002101, CY002109, CY002117, CY002125, CY002133, CY002141,
CY002149, CY002157, CY002165, CY002173, CY002181, CY002189, CY002197, CY002205,
CY002213, CY002221, CY002229, CY002237, CY002245, CY002253, CY002261, CY002269,
CY002277, CY002285, CY002293, CY002301, CY002309, CY002317, CY002333, CY002341,
CY002349, CY002357, CY002365, CY002373, CY002381, CY002389, CY002397, CY002405,
CY002413, CY002421, CY002429, CY002437, CY002445, CY002453, CY002461, CY002469,
CY002477, CY002485, CY002493, CY002501, CY002509, CY002517, CY002525, CY002533,
CY002541, CY002549, CY002557, CY002565, CY002573, CY002581, CY002589, CY002597,
CY002605, CY002613, CY002621, CY002629, CY002637, CY002645, CY002653, CY002661,
CY002669, CY002677, CY002685, CY002693, CY002701, CY002709, CY002717, CY002725,
CY002733, CY002741, CY002749, CY002757, CY002765, CY002773, CY002781, CY002789,
CY002797, CY002805, CY002813, CY002821, CY002911, CY002919, CY002927, CY002935,
CY002943, CY002951, CY002959, CY002967, CY002974, CY002981, CY002989, CY002997,
CY003005, CY003013, CY003021, CY003029, CY003037, CY003045, CY003053, CY003061,
CY003069, CY003077, CY003085, CY003093, CY003101, CY003109, CY003117, CY003126,
CY003133, CY003141, CY003149, CY003157, CY003165, CY003173, CY003181, CY003189,
CY003197, CY003205, CY003213, CY003221, CY003229, CY003237, CY003245, CY003253,
CY003261, CY003269, CY003277, CY003285, CY003293, CY003301, CY003309, CY003317,
CY003325, CY003333, CY003341, CY003349, CY003357, CY003373, CY003381, CY003389,
CY003397, CY003405, CY003413, CY003421, CY003429, CY003437, CY003445, CY003453,
CY003461, CY003469, CY003477, CY003485, CY003493, CY003501, CY003509, CY003517,
CY003525, CY003533, CY003541, CY003549, CY003557, CY003565, CY003573, CY003581,
CY003589, CY003597, CY003605, CY003613, CY003621, CY003629, CY003637, CY003645,
CY003653, CY003661, CY003669, CY003677, CY003685, CY003693, CY003701, CY003709,
CY003717, CY003725, CY003733, CY003741, CY003749, CY003757, CY003766, CY003774,
CY003782, CY003790, CY003798, CY003806, CY003814, CY003822, CY003830, CY003838,
CY006049, CY006057, CY006065, CY006073, CY006081, CY006089, CY006097, CY006104,
CY006112, CY006120, CY006128, CY006136, CY006144, CY006152, CY006160, CY006168,
CY006176, CY006184, CY006192, CY006200, CY006208, CY006216, CY006224, CY006232,
CY006240, CY006248, CY006256, CY006264, CY006272, CY006280, CY006288, CY006296,
CY006304, CY006312, CY006320, CY006328, CY006336, CY006344, CY006352, CY006360,
CY006368, CY006376, CY006384, CY006392, CY006400, CY006408, CY006416, CY006424,
CY006432, CY006440, CY006448, CY006456, CY006464, CY006472, CY006480, CY006488,
CY006496, CY006504, CY006512, CY006520, CY006528, CY006536, CY006544, CY006552,
CY006560, CY006568, CY006576, CY006584, CY006592, CY006600, CY006608, CY006616,
CY006624, CY006632, CY006640, CY006664, CY006672, CY006680, CY006688, CY006696,
CY006704, CY006712, CY006720, CY006728, CY006736, CY006744, CY006752, CY006760,
CY006768, CY006776, CY006784, CY006792, CY006800, CY006808, CY006816, CY006824,
CY006832, CY006840, CY006848, CY006856, CY006864, CY006872, CY006880, CY006888,
CY006896, CY006904, CY006912, CY006920, CY006928, CY006936, CY006944, CY006952,
CY006960, CY006968, CY006976, CY006984, CY006992, CY007000, CY007008, CY007016,
CY007024, CY007032, CY007040, CY007048, CY007056, CY007064, CY007072, CY007080,
CY007088, CY007096, CY007104, CY007112, CY007120, CY007128, CY007136, CY007144,
CY007152, CY007160, CY007168, CY007176, CY007184, CY007192, CY007200, CY007208,
CY007216, CY007224, CY007232, CY007240, CY007248, CY007256, CY007264, CY007272,
CY007280, CY007288, CY007296, CY007304, CY007312, CY007320, CY007328, CY007336,
CY007344, CY007352, CY007360, CY007368, CY007376, CY007384, CY007392, CY007400,
CY007408, CY007416, CY007424, CY007432, CY007440, CY007448, CY007456, CY007464,
CY007472, CY007480, CY007488, CY007496, CY007504, CY007512, CY007520, CY007528,
CY007536, CY007544, CY007552, CY007560, CY007568, CY007576, CY007584, CY007592,
CY007600, CY007608, CY007616, CY007624, CY007632, CY007640, CY007648, CY007656,
CY007664, CY007672, CY007680, CY007688, CY007696, CY007704, CY007712, CY007720,
CY007728, CY007736, CY007744, CY007752, CY007760, CY007768, CY007776, CY007784,
CY007792, CY007800, CY007808, CY007816, CY007824, CY007832, CY007840, CY007848,
CY007856, CY007864, CY007872, CY007880, CY007888, CY007896, CY007904, CY007912,
CY007920, CY007928, CY007936, CY007944, CY007952, CY007960, CY007968, CY007976,
CY007984, CY007992, CY008000, CY008008, CY008016, CY008024, CY008032, CY008040,
CY008048, CY008056, CY008064, CY008072, CY008080, CY008088, CY008096, CY008104,
CY008112, CY008120, CY008128, CY008136, CY008144, CY008153, CY008161, CY008169,
CY008177, CY008185, CY008193, CY008201, CY008209, CY008217, CY008225, CY008233,
CY008241, CY008249, CY008257, CY008265, CY008273, CY008281, CY008289, CY008297,
CY008305, CY008313, CY008321, CY008329, CY008337, CY008345, CY008353, CY008361,
CY008369, CY008377, CY008385, CY008393, CY008401, CY008409, CY008417, CY008425,
CY008433, CY008441, CY008449, CY008457, CY008465, CY008473, CY008481, CY008489,
CY008497, CY008505, CY008513, CY008521, CY008529, CY008537, CY008545, CY008553,
CY008561, CY008569, CY008577, CY008585, CY008593, CY008601, CY008609, CY008617,
CY008625, CY008633, CY008641, CY008649, CY008657, CY008665, CY008673, CY008681,
CY008689, CY008697, CY008705, CY008713, CY008721, CY008729, CY008737, CY008745,
CY008753, CY008761, CY008769, CY008777, CY008785, CY008793, CY008801, CY008809,
CY008817, CY008825, CY008833, CY008841, CY008849, CY008857, CY008865, CY008873,
CY008881, CY008889, CY008897, CY008905, CY008913, CY008921, CY008929, CY008937,
CY008945, CY008953, CY008961, CY008969, CY008977, CY008985, CY008993, CY009001,
CY009009, CY009017, CY009025, CY009033, CY009041, CY009049, CY009057, CY009065,
CY009073, CY009081, CY009089, CY009097, CY009105, CY009113, CY009121, CY009129,
CY009137, CY009145, CY009153, CY009161, CY009169, CY009177, CY009185, CY009193,
CY009201, CY009209, CY009217, CY009225, CY009233, CY009241, CY009249, CY009257,
CY009265, CY009273, CY009281, CY009289, CY009297, CY009321, CY009329, CY009337,
CY009345, CY009353, CY009361, CY009369, CY009393, CY009401, CY009409, CY009417,
CY009425, CY009433, CY009441, CY009449, CY009457, CY009465, CY009473, CY009481,
CY009489, CY009497, CY009505, CY009513, CY009521, CY009529, CY009537, CY009545,
CY009553, CY009561, CY009569, CY009577, CY009585, CY009593, CY009601, CY009609,
CY009617, CY009625, CY009641, CY009649, CY009657, CY009665, CY009673, CY009681,
CY009689, CY009697, CY009705, CY009713, CY009721, CY009729, CY009737, CY009745,
CY009753, CY009761, CY009769, CY009777, CY009785, CY009793, CY009801, CY009809,
CY009817, CY009825, CY009833, CY009841, CY009849, CY009857, CY009865, CY009873,
CY009881, CY009889, CY009905, CY009913, CY009929, CY009937, CY009945, CY009953,
CY009961, CY009969, CY009977, CY009985, CY009993, CY010001, CY010009, CY010017,
CY010025, CY010033, CY010041, CY010049, CY010057, CY010065, CY010073, CY010081,
CY010089, CY010097, CY010105, CY010113, CY010121, CY010129, CY010137, CY010145,
CY010153, CY010161, CY010169, CY010177, CY010185, CY010193, CY010201, CY010209,
CY010217, CY010225, CY010233, CY010241, CY010249, CY010257, CY010265, CY010273,
CY010281, CY010289, CY010297, CY010305, CY010313, CY010321, CY010329, CY010337,
CY010345, CY010353, CY010361, CY010369, CY010377, CY010385, CY010393, CY010401,
CY010409, CY010417, CY010425, CY010433, CY010441, CY010449, CY010457, CY010465,
CY010473, CY010481, CY010489, CY010497, CY010505, CY010513, CY010521, CY010529,
CY010537, CY010545, CY010553, CY010561, CY010593, CY010601, CY010609, CY010617,
CY010625, CY010633, CY010641, CY010649, CY010657, CY010665, CY010673, CY010681,
CY010689, CY010697, CY010705, CY010713, CY010721, CY010729, CY010737, CY010745,
CY010753, CY010761, CY010769, CY010777, CY010785, CY010793, CY010801, CY010809,
CY010817, CY010825, CY010833, CY010841, CY010849, CY010857, CY010865, CY010873,
CY010881, CY010889, CY010897, CY010905, CY010913, CY010921, CY010929, CY010937,
CY010945, CY010953, CY010961, CY010969, CY010977, CY010985, CY010993, CY011001,
CY011009, CY011017, CY011025, CY011069, CY011077, CY011085, CY011093, CY011125,
CY011133, CY011141, CY011149, CY011157, CY011165, CY011173, CY011181, CY011189,
CY011197, CY011205, CY011213, CY011221, CY011229, CY011237, CY011245, CY011261,
CY011269, CY011277, CY011285, CY011293, CY011301, CY011309, CY011317, CY011325,
CY011333, CY011341, CY011349, CY011357, CY011365, CY011373, CY011381, CY011389,
CY011397, CY011405, CY011413, CY011421, CY011429, CY011437, CY011445, CY011453,
CY011461, CY011469, CY011477, CY011485, CY011493, CY011501, CY011509, CY011517,
CY011525, CY011533, CY011541, CY011549, CY011557, CY011565, CY011573, CY011581,
CY011589, CY011597, CY011605, CY011613, CY011621, CY011629, CY011637, CY011645,
CY011653, CY011661, CY011669, CY011677, CY011685, CY011693, CY011701, CY011709,
CY011717, CY011725, CY011733, CY011741, CY011749, CY011757, CY011765, CY011773,
CY011781, CY011789, CY011797, CY011805, CY011813, CY011821, CY011829, CY011837,
CY011845, CY011853, CY011861, CY011869, CY011877, CY011885, CY011893, CY011901,
CY011909, CY011917, CY011925, CY011933, CY011941, CY011949, CY011957, CY011965,
CY011973, CY011981, CY011989, CY011997, CY012005, CY012013, CY012021, CY012029,
CY012037, CY012045, CY012053, CY012061, CY012069, CY012077, CY012085, CY012093,
CY012101, CY012109, CY012117, CY012125, CY012133, CY012141, CY012149, CY012157,
CY012165, CY012173, CY012181, CY012189, CY012197, CY012205, CY012213, CY012221,
CY012229, CY012237, CY012245, CY012253, CY012261, CY012269, CY012277, CY012285,
CY012293, CY012301, CY012309, CY012317, CY012325, CY012333, CY012341, CY012349,
CY012357, CY012365, CY012373, CY012381, CY012389, CY012397, CY012405, CY012413,
CY012421, CY012429, CY012437, CY012445, CY012453, CY012461, CY012469, CY012477,
CY012485, CY012493, CY012501, CY012509, CY012517, CY012525, CY012533, CY012541,
CY012549, CY012557, CY012565, CY012573, CY012581, CY012589, CY012597, CY012605,
CY012613, CY012621, CY012629, CY012637, CY012645, CY012653, CY012661, CY012669,
CY012677, CY012685, CY012693, CY012701, CY012709, CY012717, CY012725, CY012733,
CY012741, CY012749, CY012757, CY012765, CY012773, CY012781, CY012789, CY012797,
CY012853, CY012861, CY012869, CY012877, CY012885, CY012893, CY012901, CY012909,
CY012917, CY012925, CY012933, CY012941, CY012949, CY012957, CY012965, CY012973,
CY012981, CY012989, CY012997, CY013005, CY013013, CY013021, CY013029, CY013037,
CY013045, CY013053, CY013061, CY013069, CY013077, CY013085, CY013093, CY013101,
CY013109, CY013117, CY013125, CY013133, CY013141, CY013149, CY013157, CY013165,
CY013173, CY013181, CY013189, CY013197, CY013205, CY013213, CY013221, CY013229,
CY013237, CY013245, CY013276, CY013284, CY013292, CY013300, CY013308, CY013316,
CY013324, CY013332, CY013340, CY013348, CY013356, CY013364, CY013372, CY013380,
CY013388, CY013394, CY013402, CY013410, CY013418, CY013426, CY013434, CY013442,
CY013450, CY013458, CY013466, CY013474, CY013482, CY013490, CY013498, CY013506,
CY013514, CY013522, CY013530, CY013538, CY013546, CY013554, CY013562, CY013570,
CY013578, CY013586, CY013594, CY013602, CY013610, CY013618, CY013626, CY013634,
CY013642, CY013650, CY013658, CY013666, CY013674, CY013682, CY013690, CY013698,
CY013706, CY013714, CY013722, CY013730, CY013738, CY013746, CY013754, CY013762,
CY013770, CY013778, CY013786, CY013794, CY013802, CY013810, CY013818, CY013826,
CY013834, CY013842, CY013850, CY013858, CY013876, CY013884, CY013892, CY013900,
CY013908, CY013916, CY013924, CY013932, CY013940, CY013948, CY013956, CY013964,
CY013972, CY013980, CY013988, CY013996, CY014004, CY014012, CY014020, CY014028,
CY014036, CY014044, CY014052, CY014060, CY014068, CY014076, CY014084, CY014092,
CY014100, CY014108, CY014116, CY014124, CY014132, CY014140, CY014148, CY014156,
CY014164, CY014169, CY014171, CY014271, CY014279, CY014287, CY014295, CY014302,
CY014310, CY014321, CY014326, CY014328, CY014330, CY014334, CY014338, CY014340,
CY014342, CY014347, CY014350, CY014353, CY014354, CY014357, CY014362, CY014366,
CY014373, CY014381, CY014389, CY014394, CY014402, CY014410, CY014418, CY014426,
CY014434, CY014442, CY014450, CY014458, CY014466, CY014474, CY014482, CY014490,
CY014498, CY014511, CY014519, CY014528, CY014536, CY014542, CY014981, CY015011,
CY015513, CY015521, CY015529, CY015537, CY015545, CY015553, CY015561, CY015569,
CY015577, CY015585, CY015593, CY015601, CY015609, CY015617, CY015625, CY015633,
CY015641, CY015649, CY015657, CY015665, CY015673, CY015681, CY015689, CY015697,
CY015705, CY015713, CY015721, CY015729, CY015737, CY015745, CY015753, CY015761,
CY015769, CY015777, CY015785, CY015793, CY015801, CY015809, CY015817, CY015825,
CY015833, CY015841, CY015849, CY015857, CY015865, CY015873, CY015881, CY015889,
CY015897, CY015905, CY015913, CY015921, CY015929, CY015937, CY015945, CY015953,
CY015961, CY015969, CY015977, CY015985, CY015993, CY016001, CY016009, CY016017,
CY016025, CY016033, CY016041, CY016049, CY016057, CY016065, CY016073, CY016081,
CY016089, CY016097, CY016105, CY016113, CY016121, CY016201, CY016209, CY016217,
CY016233, CY016241, CY016249, CY016257, CY016265, CY016273, CY016408, CY016432,
CY016440, CY016448, CY016456, CY016464, CY016472, CY016480, CY016488, CY016496,
CY016504, CY016512, CY016520, CY016528, CY016536, CY016544, CY016552, CY016560,
CY016568, CY016576, CY016584, CY016592, CY016600, CY016608, CY016632, CY016640,
CY016648, CY016656, CY016664, CY016672, CY016680, CY016688, CY016696, CY016704,
CY016712, CY016720, CY016728, CY016736, CY016744, CY016752, CY016760, CY016768,
CY016776, CY016968, CY016976, CY016984, CY016992, CY017000, CY017008, CY017016,
CY017024, CY017088, CY017096, CY017104, CY017112, CY017120, CY017128, CY017136,
CY017144, CY017152, CY017160, CY017168, CY017176, CY017200, CY017208, CY017216,
CY017224, CY017232, CY017240, CY017248, CY017256, CY017264, CY017272, CY017288,
CY017296, CY017304, CY017312, CY017320, CY017328, CY017336, CY017344, CY017352,
CY017360, CY017368, CY017376, CY017384, CY017392, CY017400, CY017424, CY017432,
CY017440, CY017448, CY017456, CY017464, CY017472, CY017480, CY017488, CY017496,
CY017504, CY017512, CY017520, CY017528, CY017536, CY017544, CY017552, CY017560,
CY017568, CY017576, CY017584, CY017592, CY017600, CY017608, CY017616, CY017624,
CY017632, CY017637, CY017645, CY017653, CY017661, CY017669, CY017677, CY017687,
DQ099791, DQ099792, DQ138184, DQ138185, DQ138186, DQ138187, DQ138188, DQ208311,
DQ360839, DQ372596, DQ381564, DQ415305, DQ415306, DQ415307, DQ415308, DQ415309,
DQ415310, DQ415311, DQ415312, DQ415313, DQ415314, DQ415315, DQ469957, DQ487327,
DQ487335, DQ493332, DQ493333, DQ493334, DQ493335, DQ493336, DQ493337, DQ493338,
DQ493339, DQ493340, DQ493341, DQ508824, DQ508832, DQ508840, DQ508848, DQ508856,
DQ508864, DQ508872, DQ508880, DQ508888, DQ508896, DQ508904, DQ508928, DQ535729,
EF100817, EF101746, EF101755, ISDN121932, ISDN121933, ISDN125788, ISDN125872,
ISDN128031, ISDN129532, ISDN129581, ISDN130370, ISDN130378, ISDN130917,
ISDN131200, ISDN132411, ISDN132419, ISDN133101, ISDN133321, ISDN133328,
ISDN133361, ISDN133369, ISDN133375, ISDN13421, ISDN136846, ISDN136854,
ISDN138753, ISDN138769, ISDN138777, ISDN140040, ISDN140041, ISDN140042,
ISDN140043, ISDN140044, ISDN140045, ISDN140046, ISDN140047, ISDN140815,
ISDN140823, ISDN140834, ISDN140842, ISDN140850, ISDN140858, ISDN140865,
ISDN140909, ISDN140910, ISDN140911, ISDN140931, ISDN181364, ISDN183250,
ISDN183255, ISDN183257, ISDN183259, ISDN183263, ISDN183267, ISDN183269,
ISDN183271, ISDN183276, ISDN183279, ISDN183282, ISDN183283, ISDN183286,
ISDN183291, ISDN183295, ISDN183302, ISDN183310, ISDN183318, ISDN183699,
ISDN183707, ISDN183715, ISDN183723, ISDN183731, ISDN183739, ISDN183747,
ISDN183755, ISDN183763, ISDN183771, ISDN183779, ISDN185502, ISDN187426,
ISDN187434, ISDN187442, ISDN187450, ISDN187458, ISDN204134, ISDN204142,
ISDN204150, ISDN207104, ISDN207112, ISDN40934, ISDN40940, J02139, M23974, M26078,
M26079, M81573, M81579, M81585, NC_002022, U71136, U71137, U71138, U71139, X17336,
X99039
4: GenBank and LANL accession numbers for HA sequences (segment 4) used in this
analysis.
AB019354, AB019355, AB019356, AB019357, AB056699, AB212054, AB239125, AB262463,
AB284320, AF017272, AF028020, AF028709, AF036356, AF046088, AF046096, AF046097,
AF046098, AF084279, AF084280, AF084281, AF084532, AF102671, AF102672, AF102673,
AF102674, AF102675, AF102676, AF102677, AF102678, AF102679, AF102680, AF102681,
AF102682, AF117241, AF348176, AF348177, AF348178, AF348179, AF363502, AF363503,
AF363504, AF382318, AF382319, AF382320, AF382321, AF382322, AF382323, AF382324,
AF382325, AF382326, AF382327, AF382328, AF386773, AF386774, AF386775, AF386776,
AF386777, AF386778, AF386780, AF386781, AF389118, AF398874, AF398875, AF398878,
AJ252129, AJ252131, AJ289702, AJ289703, AJ293926, AJ311466, AJ344014, AJ344022,
AJ404626, AJ404627, AJ867074, AY032978, AY035588, AY035589, AY035590, AY035591,
AY035592, AY271794, AY282756, AY282757, AY282758, AY282759, AY289927, AY289928,
AY289929, AY289930, AY531033, AY531035, AY531039, AY531040, AY531041, AY531042,
AY531043, AY531044, AY531045, AY531046, AY531047, AY531048, AY531049, AY531050,
AY531051, AY531052, AY531053, AY531054, AY531055, AY531056, AY531057, AY531058,
AY531059, AY531060, AY531061, AY555150, AY555153, AY575869, AY589647, AY589648,
AY589649, AY589650, AY589651, AY589652, AY589653, AY589654, AY589655, AY589656,
AY589657, AY589658, AY589659, AY589660, AY589661, AY643085, AY643086, AY643087,
AY651333, AY651334, AY651335, AY651336, AY661020, AY661041, AY661042, AY661043,
AY661053, AY661054, AY661055, AY661056, AY661059, AY661066, AY661073, AY679514,
AY682833, AY818135, AY884276, AY884277, AY884278, AY884279, AY884280, AY884281,
AY884282, AY884283, AY884284, CY000001, CY000009, CY000017, CY000025, CY000033,
CY000041, CY000049, CY000057, CY000065, CY000073, CY000081, CY000089, CY000097,
CY000105, CY000113, CY000121, CY000129, CY000137, CY000145, CY000153, CY000161,
CY000169, CY000177, CY000185, CY000193, CY000201, CY000209, CY000217, CY000225,
CY000233, CY000241, CY000249, CY000257, CY000265, CY000273, CY000281, CY000289,
CY000297, CY000305, CY000313, CY000321, CY000329, CY000337, CY000345, CY000353,
CY000361, CY000369, CY000377, CY000385, CY000393, CY000401, CY000409, CY000417,
CY000425, CY000433, CY000441, CY000449, CY000457, CY000465, CY000473, CY000481,
CY000489, CY000497, CY000505, CY000513, CY000521, CY000529, CY000537, CY000545,
CY000553, CY000561, CY000569, CY000584, CY000585, CY000593, CY000601, CY000609,
CY000617, CY000625, CY000633, CY000641, CY000649, CY000657, CY000665, CY000673,
CY000681, CY000689, CY000697, CY000705, CY000713, CY000721, CY000729, CY000737,
CY000745, CY000753, CY000761, CY000769, CY000777, CY000785, CY000793, CY000801,
CY000809, CY000817, CY000825, CY000833, CY000841, CY000849, CY000857, CY000865,
CY000873, CY000881, CY000889, CY000901, CY000909, CY000917, CY000925, CY000933,
CY000941, CY000949, CY000957, CY000965, CY000973, CY000981, CY000989, CY000997,
CY001005, CY001013, CY001021, CY001029, CY001037, CY001045, CY001053, CY001061,
CY001064, CY001072, CY001080, CY001088, CY001096, CY001104, CY001112, CY001120,
CY001128, CY001136, CY001144, CY001152, CY001160, CY001168, CY001176, CY001184,
CY001197, CY001205, CY001213, CY001221, CY001229, CY001237, CY001245, CY001253,
CY001261, CY001269, CY001277, CY001285, CY001293, CY001301, CY001309, CY001317,
CY001325, CY001333, CY001341, CY001349, CY001357, CY001365, CY001373, CY001381,
CY001397, CY001405, CY001413, CY001421, CY001429, CY001437, CY001445, CY001453,
CY001461, CY001469, CY001477, CY001485, CY001493, CY001504, CY001512, CY001520,
CY001528, CY001536, CY001544, CY001552, CY001560, CY001568, CY001576, CY001584,
CY001592, CY001600, CY001608, CY001616, CY001624, CY001632, CY001640, CY001648,
CY001656, CY001664, CY001672, CY001688, CY001696, CY001704, CY001712, CY001720,
CY001728, CY001736, CY001744, CY001752, CY001760, CY001768, CY001776, CY001784,
CY001792, CY001800, CY001808, CY001816, CY001824, CY001832, CY001840, CY001848,
CY001856, CY001864, CY001872, CY001880, CY001888, CY001896, CY001904, CY001912,
CY001920, CY001928, CY001936, CY001944, CY001952, CY001960, CY001968, CY001976,
CY001984, CY001992, CY002000, CY002008, CY002016, CY002024, CY002032, CY002040,
CY002048, CY002056, CY002064, CY002072, CY002080, CY002088, CY002096, CY002104,
CY002112, CY002120, CY002128, CY002136, CY002144, CY002152, CY002160, CY002168,
CY002176, CY002184, CY002192, CY002200, CY002208, CY002216, CY002224, CY002232,
CY002240, CY002248, CY002256, CY002264, CY002272, CY002280, CY002288, CY002296,
CY002304, CY002312, CY002328, CY002336, CY002344, CY002352, CY002360, CY002368,
CY002376, CY002384, CY002392, CY002400, CY002408, CY002416, CY002424, CY002432,
CY002440, CY002448, CY002456, CY002464, CY002472, CY002480, CY002488, CY002496,
CY002504, CY002512, CY002520, CY002528, CY002536, CY002544, CY002552, CY002560,
CY002568, CY002576, CY002584, CY002592, CY002600, CY002608, CY002616, CY002624,
CY002632, CY002640, CY002648, CY002656, CY002664, CY002672, CY002680, CY002688,
CY002696, CY002704, CY002712, CY002720, CY002728, CY002736, CY002744, CY002752,
CY002760, CY002768, CY002776, CY002784, CY002792, CY002800, CY002808, CY002816,
CY002904, CY002905, CY002906, CY002914, CY002922, CY002930, CY002938, CY002946,
CY002954, CY002962, CY002984, CY002992, CY003000, CY003008, CY003016, CY003024,
CY003032, CY003040, CY003048, CY003056, CY003064, CY003072, CY003080, CY003088,
CY003096, CY003104, CY003112, CY003120, CY003123, CY003136, CY003144, CY003152,
CY003160, CY003168, CY003176, CY003184, CY003192, CY003200, CY003208, CY003216,
CY003224, CY003232, CY003240, CY003248, CY003256, CY003264, CY003272, CY003280,
CY003288, CY003296, CY003304, CY003312, CY003320, CY003328, CY003336, CY003344,
CY003352, CY003368, CY003376, CY003384, CY003392, CY003400, CY003408, CY003416,
CY003424, CY003432, CY003440, CY003448, CY003456, CY003464, CY003472, CY003480,
CY003488, CY003496, CY003504, CY003512, CY003520, CY003528, CY003536, CY003544,
CY003552, CY003560, CY003568, CY003576, CY003584, CY003592, CY003600, CY003608,
CY003616, CY003624, CY003632, CY003640, CY003648, CY003656, CY003664, CY003672,
CY003680, CY003688, CY003696, CY003704, CY003712, CY003720, CY003728, CY003736,
CY003744, CY003752, CY003761, CY003769, CY003777, CY003785, CY003793, CY003801,
CY003809, CY003817, CY003825, CY003833, CY006043, CY006044, CY006052, CY006060,
CY006068, CY006076, CY006084, CY006092, CY006107, CY006115, CY006123, CY006131,
CY006139, CY006147, CY006155, CY006163, CY006171, CY006179, CY006187, CY006195,
CY006203, CY006211, CY006219, CY006227, CY006235, CY006243, CY006251, CY006259,
CY006267, CY006275, CY006283, CY006291, CY006299, CY006307, CY006315, CY006323,
CY006331, CY006339, CY006347, CY006355, CY006363, CY006371, CY006379, CY006387,
CY006395, CY006403, CY006411, CY006419, CY006427, CY006435, CY006443, CY006451,
CY006459, CY006467, CY006475, CY006483, CY006491, CY006499, CY006507, CY006515,
CY006523, CY006531, CY006539, CY006547, CY006555, CY006563, CY006571, CY006579,
CY006587, CY006595, CY006603, CY006611, CY006619, CY006627, CY006635, CY006659,
CY006667, CY006675, CY006683, CY006691, CY006699, CY006707, CY006715, CY006723,
CY006731, CY006739, CY006747, CY006755, CY006763, CY006771, CY006779, CY006787,
CY006795, CY006803, CY006811, CY006819, CY006827, CY006835, CY006843, CY006851,
CY006859, CY006867, CY006875, CY006883, CY006891, CY006899, CY006907, CY006915,
CY006923, CY006931, CY006939, CY006947, CY006955, CY006963, CY006971, CY006979,
CY006987, CY006995, CY007003, CY007011, CY007019, CY007027, CY007035, CY007043,
CY007051, CY007059, CY007067, CY007075, CY007083, CY007091, CY007099, CY007107,
CY007115, CY007123, CY007131, CY007139, CY007147, CY007155, CY007163, CY007171,
CY007179, CY007187, CY007195, CY007203, CY007211, CY007219, CY007227, CY007235,
CY007243, CY007251, CY007259, CY007267, CY007275, CY007283, CY007291, CY007299,
CY007307, CY007315, CY007323, CY007331, CY007339, CY007347, CY007355, CY007363,
CY007371, CY007379, CY007387, CY007395, CY007403, CY007411, CY007419, CY007427,
CY007435, CY007443, CY007451, CY007459, CY007467, CY007475, CY007483, CY007491,
CY007499, CY007507, CY007515, CY007523, CY007531, CY007539, CY007547, CY007555,
CY007563, CY007571, CY007579, CY007587, CY007595, CY007603, CY007611, CY007619,
CY007627, CY007635, CY007643, CY007651, CY007659, CY007667, CY007675, CY007683,
CY007691, CY007699, CY007707, CY007715, CY007723, CY007731, CY007739, CY007747,
CY007755, CY007763, CY007771, CY007779, CY007787, CY007795, CY007803, CY007811,
CY007819, CY007827, CY007835, CY007843, CY007851, CY007859, CY007867, CY007875,
CY007883, CY007891, CY007899, CY007907, CY007915, CY007923, CY007931, CY007939,
CY007947, CY007955, CY007963, CY007971, CY007979, CY007987, CY007995, CY008003,
CY008011, CY008019, CY008027, CY008035, CY008043, CY008051, CY008059, CY008067,
CY008075, CY008083, CY008091, CY008099, CY008107, CY008115, CY008123, CY008131,
CY008139, CY008148, CY008156, CY008164, CY008172, CY008180, CY008188, CY008196,
CY008204, CY008212, CY008220, CY008228, CY008236, CY008244, CY008252, CY008260,
CY008268, CY008276, CY008284, CY008292, CY008300, CY008308, CY008316, CY008324,
CY008332, CY008340, CY008348, CY008356, CY008364, CY008372, CY008380, CY008388,
CY008396, CY008404, CY008412, CY008420, CY008428, CY008436, CY008444, CY008452,
CY008460, CY008468, CY008476, CY008484, CY008492, CY008500, CY008508, CY008516,
CY008524, CY008532, CY008540, CY008548, CY008556, CY008564, CY008572, CY008580,
CY008588, CY008596, CY008604, CY008612, CY008620, CY008628, CY008636, CY008644,
CY008652, CY008660, CY008668, CY008676, CY008684, CY008692, CY008700, CY008708,
CY008716, CY008724, CY008732, CY008740, CY008748, CY008756, CY008764, CY008772,
CY008780, CY008788, CY008796, CY008804, CY008812, CY008820, CY008828, CY008836,
CY008844, CY008852, CY008860, CY008868, CY008876, CY008884, CY008892, CY008900,
CY008908, CY008916, CY008924, CY008932, CY008940, CY008948, CY008956, CY008964,
CY008972, CY008980, CY008988, CY008996, CY009004, CY009012, CY009020, CY009028,
CY009036, CY009044, CY009052, CY009060, CY009068, CY009076, CY009084, CY009092,
CY009100, CY009108, CY009116, CY009124, CY009132, CY009140, CY009148, CY009156,
CY009164, CY009172, CY009180, CY009188, CY009196, CY009204, CY009212, CY009220,
CY009228, CY009236, CY009244, CY009252, CY009260, CY009268, CY009276, CY009284,
CY009292, CY009316, CY009324, CY009332, CY009340, CY009348, CY009356, CY009364,
CY009388, CY009396, CY009404, CY009412, CY009420, CY009428, CY009436, CY009444,
CY009452, CY009460, CY009468, CY009476, CY009484, CY009492, CY009500, CY009508,
CY009516, CY009524, CY009532, CY009540, CY009548, CY009556, CY009564, CY009572,
CY009580, CY009588, CY009596, CY009604, CY009612, CY009620, CY009636, CY009644,
CY009652, CY009660, CY009668, CY009676, CY009684, CY009692, CY009700, CY009708,
CY009716, CY009724, CY009732, CY009740, CY009748, CY009756, CY009764, CY009772,
CY009780, CY009788, CY009796, CY009804, CY009812, CY009820, CY009828, CY009836,
CY009844, CY009852, CY009860, CY009868, CY009876, CY009884, CY009900, CY009908,
CY009924, CY009932, CY009940, CY009948, CY009956, CY009964, CY009972, CY009980,
CY009988, CY009996, CY010004, CY010012, CY010020, CY010028, CY010036, CY010044,
CY010052, CY010060, CY010068, CY010076, CY010084, CY010092, CY010100, CY010108,
CY010116, CY010124, CY010132, CY010140, CY010148, CY010156, CY010164, CY010172,
CY010180, CY010188, CY010196, CY010204, CY010212, CY010220, CY010228, CY010236,
CY010244, CY010252, CY010260, CY010268, CY010276, CY010284, CY010292, CY010300,
CY010308, CY010316, CY010324, CY010332, CY010340, CY010348, CY010356, CY010364,
CY010372, CY010380, CY010388, CY010396, CY010404, CY010412, CY010420, CY010428,
CY010436, CY010444, CY010452, CY010460, CY010468, CY010476, CY010484, CY010492,
CY010500, CY010508, CY010516, CY010524, CY010532, CY010540, CY010548, CY010556,
CY010588, CY010596, CY010604, CY010612, CY010620, CY010628, CY010636, CY010644,
CY010652, CY010660, CY010668, CY010676, CY010684, CY010692, CY010700, CY010708,
CY010716, CY010724, CY010732, CY010740, CY010748, CY010756, CY010764, CY010772,
CY010780, CY010788, CY010796, CY010804, CY010812, CY010820, CY010828, CY010836,
CY010844, CY010852, CY010860, CY010868, CY010876, CY010884, CY010892, CY010900,
CY010908, CY010916, CY010924, CY010932, CY010940, CY010948, CY010956, CY010964,
CY010972, CY010980, CY010988, CY010996, CY011004, CY011012, CY011020, CY011064,
CY011072, CY011080, CY011088, CY011120, CY011128, CY011136, CY011144, CY011152,
CY011160, CY011168, CY011176, CY011184, CY011192, CY011200, CY011208, CY011216,
CY011224, CY011232, CY011240, CY011256, CY011264, CY011272, CY011280, CY011288,
CY011296, CY011304, CY011312, CY011320, CY011328, CY011336, CY011344, CY011352,
CY011360, CY011368, CY011376, CY011384, CY011392, CY011400, CY011408, CY011416,
CY011424, CY011432, CY011440, CY011448, CY011456, CY011464, CY011472, CY011480,
CY011488, CY011496, CY011504, CY011512, CY011520, CY011528, CY011536, CY011544,
CY011552, CY011560, CY011568, CY011576, CY011584, CY011592, CY011600, CY011608,
CY011616, CY011624, CY011632, CY011640, CY011648, CY011656, CY011664, CY011672,
CY011680, CY011688, CY011696, CY011704, CY011712, CY011720, CY011728, CY011736,
CY011744, CY011752, CY011760, CY011768, CY011776, CY011784, CY011792, CY011800,
CY011808, CY011816, CY011824, CY011832, CY011840, CY011848, CY011856, CY011864,
CY011872, CY011880, CY011888, CY011896, CY011904, CY011912, CY011920, CY011928,
CY011936, CY011944, CY011952, CY011960, CY011968, CY011976, CY011984, CY011992,
CY012000, CY012008, CY012016, CY012024, CY012032, CY012040, CY012048, CY012056,
CY012064, CY012072, CY012080, CY012088, CY012096, CY012104, CY012112, CY012120,
CY012128, CY012136, CY012144, CY012152, CY012160, CY012168, CY012176, CY012184,
CY012192, CY012200, CY012208, CY012216, CY012224, CY012232, CY012240, CY012248,
CY012256, CY012264, CY012272, CY012280, CY012288, CY012296, CY012304, CY012312,
CY012320, CY012328, CY012336, CY012344, CY012352, CY012360, CY012368, CY012376,
CY012384, CY012392, CY012400, CY012408, CY012416, CY012424, CY012432, CY012440,
CY012448, CY012456, CY012464, CY012472, CY012480, CY012488, CY012496, CY012504,
CY012512, CY012520, CY012528, CY012536, CY012544, CY012552, CY012560, CY012568,
CY012576, CY012584, CY012592, CY012600, CY012608, CY012616, CY012624, CY012632,
CY012640, CY012648, CY012656, CY012664, CY012672, CY012680, CY012688, CY012696,
CY012704, CY012712, CY012720, CY012728, CY012736, CY012744, CY012752, CY012760,
CY012768, CY012776, CY012784, CY012792, CY012848, CY012856, CY012864, CY012872,
CY012880, CY012888, CY012896, CY012904, CY012912, CY012920, CY012928, CY012936,
CY012944, CY012952, CY012960, CY012968, CY012976, CY012984, CY012992, CY013000,
CY013008, CY013016, CY013024, CY013032, CY013040, CY013048, CY013056, CY013064,
CY013072, CY013080, CY013088, CY013096, CY013104, CY013112, CY013120, CY013128,
CY013136, CY013144, CY013152, CY013160, CY013168, CY013176, CY013184, CY013192,
CY013200, CY013208, CY013216, CY013224, CY013232, CY013240, CY013271, CY013279,
CY013287, CY013295, CY013303, CY013311, CY013319, CY013327, CY013335, CY013343,
CY013351, CY013359, CY013367, CY013375, CY013383, CY013389, CY013397, CY013405,
CY013413, CY013421, CY013429, CY013437, CY013445, CY013453, CY013461, CY013469,
CY013477, CY013485, CY013493, CY013501, CY013509, CY013517, CY013525, CY013533,
CY013541, CY013549, CY013557, CY013565, CY013573, CY013581, CY013589, CY013597,
CY013605, CY013613, CY013621, CY013629, CY013637, CY013645, CY013653, CY013661,
CY013669, CY013677, CY013685, CY013693, CY013701, CY013709, CY013717, CY013725,
CY013733, CY013741, CY013749, CY013757, CY013765, CY013773, CY013781, CY013789,
CY013797, CY013805, CY013813, CY013821, CY013829, CY013837, CY013845, CY013853,
CY013871, CY013879, CY013887, CY013895, CY013903, CY013911, CY013919, CY013927,
CY013935, CY013943, CY013951, CY013959, CY013967, CY013975, CY013983, CY013991,
CY013999, CY014007, CY014015, CY014023, CY014031, CY014039, CY014047, CY014055,
CY014063, CY014071, CY014079, CY014087, CY014095, CY014103, CY014111, CY014119,
CY014127, CY014135, CY014143, CY014151, CY014159, CY014168, CY014177, CY014197,
CY014198, CY014199, CY014200, CY014201, CY014202, CY014203, CY014204, CY014205,
CY014206, CY014207, CY014209, CY014210, CY014211, CY014212, CY014213, CY014272,
CY014280, CY014288, CY014296, CY014303, CY014311, CY014368, CY014376, CY014384,
CY014393, CY014401, CY014409, CY014417, CY014425, CY014433, CY014441, CY014449,
CY014457, CY014465, CY014477, CY014481, CY014489, CY014497, CY014510, CY014518,
CY014529, CY014537, CY014543, CY014976, CY015006, CY015508, CY015516, CY015524,
CY015532, CY015540, CY015548, CY015556, CY015564, CY015572, CY015580, CY015588,
CY015596, CY015604, CY015612, CY015620, CY015628, CY015636, CY015644, CY015652,
CY015660, CY015668, CY015676, CY015684, CY015692, CY015700, CY015708, CY015716,
CY015724, CY015732, CY015740, CY015748, CY015756, CY015764, CY015772, CY015780,
CY015788, CY015796, CY015804, CY015812, CY015820, CY015828, CY015836, CY015844,
CY015852, CY015860, CY015868, CY015876, CY015884, CY015892, CY015900, CY015908,
CY015916, CY015924, CY015932, CY015940, CY015948, CY015956, CY015964, CY015972,
CY015980, CY015988, CY015996, CY016004, CY016012, CY016020, CY016028, CY016036,
CY016044, CY016052, CY016060, CY016068, CY016076, CY016084, CY016092, CY016100,
CY016108, CY016116, CY016196, CY016204, CY016212, CY016228, CY016236, CY016244,
CY016252, CY016260, CY016268, CY016323, CY016324, CY016326, CY016327, CY016328,
CY016329, CY016403, CY016427, CY016435, CY016443, CY016451, CY016459, CY016467,
CY016475, CY016483, CY016491, CY016499, CY016507, CY016515, CY016523, CY016531,
CY016539, CY016547, CY016555, CY016563, CY016571, CY016579, CY016587, CY016595,
CY016603, CY016627, CY016635, CY016643, CY016651, CY016659, CY016667, CY016675,
CY016683, CY016691, CY016699, CY016707, CY016715, CY016723, CY016731, CY016739,
CY016747, CY016755, CY016763, CY016771, CY016963, CY016971, CY016979, CY016987,
CY016995, CY017003, CY017011, CY017019, CY017083, CY017091, CY017099, CY017107,
CY017115, CY017123, CY017131, CY017139, CY017147, CY017155, CY017163, CY017171,
CY017195, CY017203, CY017211, CY017219, CY017227, CY017235, CY017243, CY017251,
CY017259, CY017267, CY017283, CY017291, CY017299, CY017307, CY017315, CY017323,
CY017331, CY017339, CY017347, CY017355, CY017363, CY017371, CY017379, CY017387,
CY017395, CY017419, CY017427, CY017435, CY017443, CY017451, CY017459, CY017467,
CY017475, CY017483, CY017491, CY017499, CY017507, CY017515, CY017523, CY017531,
CY017539, CY017547, CY017555, CY017563, CY017571, CY017579, CY017587, CY017595,
CY017603, CY017611, CY017619, CY017627, CY017638, CY017646, CY017654, CY017662,
CY017670, CY017678, CY017688, D13573, D13574, D13579, D13580, DQ059385, DQ086157,
DQ086159, DQ086160, DQ086161, DQ089634, DQ089635, DQ089636, DQ089637, DQ089638,
DQ089639, DQ227423, DQ227424, DQ227425, DQ227426, DQ227427, DQ227428, DQ227429,
DQ227430, DQ227431, DQ249259, DQ249260, DQ249261, DQ249262, DQ371928, DQ371929,
DQ371930, DQ372591, DQ397950, DQ415316, DQ415317, DQ415318, DQ415319, DQ415320,
DQ415321, DQ415322, DQ415323, DQ415324, DQ415325, DQ415326, DQ435202, DQ464377,
DQ469962, DQ487340, DQ487341, DQ497719, DQ497720, DQ497722, DQ497723, DQ497724,
DQ497725, DQ497726, DQ497727, DQ497728, DQ497729, DQ508825, DQ508833, DQ508841,
DQ508849, DQ508857, DQ508865, DQ508873, DQ508881, DQ508889, DQ508897, DQ508905,
DQ508929, DQ649410, DQ842489, DQ883589, DQ883600, DQ883601, DQ883608, DQ885610,
DQ885612, DQ885614, DQ885616, DQ885618, EF061116, EF101741, EF101749, ISDN110940,
ISDN117777, ISDN117778, ISDN118371, ISDN119678, ISDN119760, ISDN121986,
ISDN125783, ISDN125873, ISDN128026, ISDN129400, ISDN129527, ISDN129582,
ISDN129921, ISDN129922, ISDN130365, ISDN130373, ISDN130912, ISDN132201,
ISDN132202, ISDN132406, ISDN132414, ISDN133098, ISDN133105, ISDN133316,
ISDN133323, ISDN133356, ISDN133364, ISDN13422, ISDN136806, ISDN136807,
ISDN136808, ISDN136809, ISDN136810, ISDN136811, ISDN136812, ISDN136813,
ISDN136814, ISDN136815, ISDN136816, ISDN136841, ISDN136849, ISDN136908,
ISDN136909, ISDN137412, ISDN137413, ISDN137414, ISDN138723, ISDN138724,
ISDN138748, ISDN138772, ISDN140050, ISDN140051, ISDN140052, ISDN140053,
ISDN140054, ISDN140055, ISDN140056, ISDN140057, ISDN140058, ISDN140059,
ISDN140060, ISDN140061, ISDN140810, ISDN140818, ISDN140835, ISDN140843,
ISDN140851, ISDN140859, ISDN140866, ISDN140894, ISDN140896, ISDN140926,
ISDN181365, ISDN183297, ISDN183305, ISDN183313, ISDN183698, ISDN183706,
ISDN183714, ISDN183722, ISDN183730, ISDN183738, ISDN183746, ISDN183754,
ISDN183762, ISDN183770, ISDN183782, ISDN185493, ISDN187421, ISDN187429,
ISDN187437, ISDN187445, ISDN187453, ISDN204133, ISDN204141, ISDN204149,
ISDN207103, ISDN207111, ISDN208026, ISDN208027, ISDN214632, ISDN214634,
ISDN214636, ISDN214638, ISDN214640, ISDN214642, ISDN214645, ISDN214648,
ISDN214651, ISDN214654, ISDN214657, ISDN214660, ISDN214663, ISDN214665,
ISDN214668, ISDN214671, ISDN214674, ISDN214677, ISDN214680, ISDN214683,
ISDN214686, ISDN214689, ISDN214692, ISDN219941, ISDN219944, ISDN219947,
ISDN219950, ISDN219953, ISDN38262, ISDN38686, ISDN38687, ISDN38688, ISDN40341,
ISDN40917, ISDN40918, ISDN48661, ISDN48662, ISDN48663, ISDN48664, ISDN48665,
ISDN48666, ISDN49460, ISDN69439, ISDN69608, ISDNASYD97, J02092, J02127, J02132,
J02135, J02176, K01330, L11125, L11126, L11133, L11134, L11142, L20406, L20407, L20408,
L20409, L20410, L24362, M21648, M38312, M38353, M54895, M55059, NC_002017, S62154,
U02085, U02464, U08858, U08859, U08903, U08904, U08905, U26830, U37727, U38242,
U53162, U53163, U97740, V01085, V01086, V01089, V01098, V01103, X05907, X17221,
Z54286, Z54287, Z54288, Z54289
5: GenBank and LANL accession numbers for NP sequences (segment 5) used in this
analysis.
AB019358, AB019359, AB019360, AB019361, AB036779, AB126624, AB126632, AB212055,
AB262464, AF028710, AF036359, AF038254, AF038255, AF038256, AF038257, AF038258,
AF038259, AF046092, AF072545, AF084276, AF084277, AF084278, AF115284, AF115285,
AF255742, AF255743, AF255744, AF255745, AF255746, AF255747, AF255748, AF255749,
AF255750, AF255751, AF255752, AF255753, AF258516, AF258517, AF342819, AF348180,
AF348181, AF348182, AF348183, AF389119, AF398867, AF483604, AJ238021, AJ289871,
AJ289872, AJ289873, AJ291400, AJ291401, AJ293924, AJ458276, AJ458277, AJ628066,
AJ867076, AY043026, AY210066, AY210067, AY210068, AY210069, AY210070, AY210071,
AY210072, AY210073, AY210074, AY210075, AY210076, AY210077, AY210078, AY210079,
AY210080, AY210081, AY210082, AY210083, AY210084, AY210085, AY210086, AY210087,
AY210088, AY210089, AY210090, AY210091, AY210092, AY210093, AY210094, AY210095,
AY210096, AY210097, AY210098, AY210099, AY210100, AY210101, AY210102, AY210103,
AY210104, AY210207, AY210208, AY210209, AY210210, AY210211, AY210212, AY210213,
AY210214, AY210215, AY210216, AY210217, AY210218, AY210219, AY210220, AY210221,
AY210222, AY210223, AY210224, AY210225, AY210226, AY210227, AY210228, AY210229,
AY210230, AY210231, AY210232, AY210233, AY210234, AY210235, AY210236, AY210237,
AY210238, AY575905, AY575906, AY651498, AY651499, AY651500, AY651501, AY744935,
AY818138, AY936880, AY936881, AY936882, CY000004, CY000012, CY000020, CY000028,
CY000036, CY000044, CY000052, CY000060, CY000068, CY000076, CY000084, CY000092,
CY000100, CY000108, CY000116, CY000124, CY000132, CY000140, CY000148, CY000156,
CY000164, CY000172, CY000180, CY000188, CY000196, CY000204, CY000212, CY000220,
CY000228, CY000236, CY000244, CY000252, CY000260, CY000268, CY000276, CY000284,
CY000292, CY000300, CY000308, CY000316, CY000324, CY000332, CY000340, CY000348,
CY000356, CY000364, CY000372, CY000380, CY000388, CY000396, CY000404, CY000412,
CY000420, CY000428, CY000436, CY000444, CY000452, CY000460, CY000468, CY000476,
CY000484, CY000492, CY000500, CY000508, CY000520, CY000524, CY000532, CY000540,
CY000548, CY000556, CY000564, CY000572, CY000579, CY000588, CY000596, CY000604,
CY000612, CY000620, CY000628, CY000636, CY000644, CY000652, CY000660, CY000668,
CY000676, CY000684, CY000692, CY000700, CY000708, CY000716, CY000724, CY000732,
CY000740, CY000748, CY000756, CY000764, CY000772, CY000780, CY000788, CY000796,
CY000804, CY000812, CY000820, CY000828, CY000836, CY000844, CY000852, CY000860,
CY000868, CY000876, CY000884, CY000892, CY000904, CY000912, CY000920, CY000928,
CY000936, CY000944, CY000952, CY000960, CY000968, CY000976, CY000984, CY000992,
CY001000, CY001008, CY001016, CY001024, CY001032, CY001040, CY001048, CY001056,
CY001067, CY001075, CY001083, CY001091, CY001099, CY001107, CY001115, CY001123,
CY001131, CY001139, CY001147, CY001155, CY001163, CY001171, CY001179, CY001187,
CY001192, CY001200, CY001208, CY001216, CY001224, CY001232, CY001240, CY001248,
CY001256, CY001264, CY001272, CY001280, CY001288, CY001296, CY001304, CY001312,
CY001320, CY001328, CY001336, CY001344, CY001352, CY001360, CY001368, CY001376,
CY001384, CY001400, CY001408, CY001416, CY001424, CY001432, CY001440, CY001448,
CY001456, CY001464, CY001472, CY001480, CY001488, CY001496, CY001507, CY001515,
CY001523, CY001531, CY001539, CY001547, CY001555, CY001563, CY001571, CY001579,
CY001587, CY001595, CY001603, CY001611, CY001619, CY001627, CY001635, CY001643,
CY001651, CY001659, CY001667, CY001675, CY001683, CY001691, CY001699, CY001707,
CY001715, CY001723, CY001731, CY001739, CY001747, CY001755, CY001763, CY001771,
CY001779, CY001787, CY001795, CY001803, CY001811, CY001819, CY001827, CY001835,
CY001843, CY001851, CY001859, CY001867, CY001875, CY001883, CY001891, CY001899,
CY001907, CY001915, CY001923, CY001931, CY001939, CY001947, CY001955, CY001963,
CY001971, CY001979, CY001987, CY001995, CY002003, CY002011, CY002019, CY002027,
CY002035, CY002043, CY002051, CY002059, CY002067, CY002075, CY002083, CY002091,
CY002099, CY002107, CY002115, CY002123, CY002131, CY002139, CY002147, CY002155,
CY002163, CY002171, CY002179, CY002187, CY002195, CY002203, CY002211, CY002219,
CY002227, CY002235, CY002243, CY002251, CY002259, CY002267, CY002275, CY002283,
CY002291, CY002299, CY002307, CY002315, CY002331, CY002339, CY002347, CY002355,
CY002363, CY002371, CY002379, CY002387, CY002395, CY002403, CY002411, CY002419,
CY002427, CY002435, CY002443, CY002451, CY002459, CY002467, CY002475, CY002483,
CY002491, CY002499, CY002507, CY002515, CY002523, CY002531, CY002539, CY002547,
CY002555, CY002563, CY002571, CY002579, CY002587, CY002595, CY002603, CY002611,
CY002619, CY002627, CY002635, CY002643, CY002651, CY002659, CY002667, CY002675,
CY002683, CY002691, CY002699, CY002707, CY002715, CY002723, CY002731, CY002739,
CY002747, CY002755, CY002763, CY002771, CY002779, CY002787, CY002795, CY002803,
CY002811, CY002819, CY002909, CY002917, CY002925, CY002933, CY002941, CY002949,
CY002957, CY002965, CY002972, CY002979, CY002987, CY002995, CY003003, CY003011,
CY003019, CY003027, CY003035, CY003043, CY003051, CY003059, CY003067, CY003075,
CY003083, CY003091, CY003099, CY003107, CY003115, CY003124, CY003130, CY003139,
CY003147, CY003155, CY003163, CY003171, CY003179, CY003187, CY003195, CY003203,
CY003211, CY003219, CY003227, CY003235, CY003243, CY003251, CY003259, CY003267,
CY003275, CY003283, CY003291, CY003299, CY003307, CY003315, CY003323, CY003331,
CY003339, CY003347, CY003355, CY003371, CY003379, CY003387, CY003395, CY003403,
CY003411, CY003419, CY003427, CY003435, CY003443, CY003451, CY003459, CY003467,
CY003475, CY003483, CY003491, CY003499, CY003507, CY003515, CY003523, CY003531,
CY003539, CY003547, CY003555, CY003563, CY003571, CY003579, CY003587, CY003595,
CY003603, CY003611, CY003619, CY003627, CY003635, CY003643, CY003651, CY003659,
CY003667, CY003675, CY003683, CY003691, CY003699, CY003707, CY003715, CY003723,
CY003731, CY003739, CY003747, CY003755, CY003764, CY003772, CY003780, CY003788,
CY003796, CY003804, CY003812, CY003820, CY003828, CY003836, CY006047, CY006055,
CY006063, CY006071, CY006079, CY006087, CY006095, CY006102, CY006110, CY006118,
CY006126, CY006134, CY006142, CY006150, CY006158, CY006166, CY006174, CY006182,
CY006190, CY006198, CY006206, CY006214, CY006222, CY006230, CY006238, CY006246,
CY006254, CY006262, CY006270, CY006278, CY006286, CY006294, CY006302, CY006310,
CY006318, CY006326, CY006334, CY006342, CY006350, CY006358, CY006366, CY006374,
CY006382, CY006390, CY006398, CY006406, CY006414, CY006422, CY006430, CY006438,
CY006446, CY006454, CY006462, CY006470, CY006478, CY006486, CY006494, CY006502,
CY006510, CY006518, CY006526, CY006534, CY006542, CY006550, CY006558, CY006566,
CY006574, CY006582, CY006590, CY006598, CY006606, CY006614, CY006622, CY006630,
CY006638, CY006662, CY006670, CY006678, CY006686, CY006694, CY006702, CY006710,
CY006718, CY006726, CY006734, CY006742, CY006750, CY006758, CY006766, CY006774,
CY006782, CY006790, CY006798, CY006806, CY006814, CY006822, CY006830, CY006838,
CY006846, CY006854, CY006862, CY006870, CY006878, CY006886, CY006894, CY006902,
CY006910, CY006918, CY006926, CY006934, CY006942, CY006950, CY006958, CY006966,
CY006974, CY006982, CY006990, CY006998, CY007006, CY007014, CY007022, CY007030,
CY007038, CY007046, CY007054, CY007062, CY007070, CY007078, CY007086, CY007094,
CY007102, CY007110, CY007118, CY007126, CY007134, CY007142, CY007150, CY007158,
CY007166, CY007174, CY007182, CY007190, CY007198, CY007206, CY007214, CY007222,
CY007230, CY007238, CY007246, CY007254, CY007262, CY007270, CY007278, CY007286,
CY007294, CY007302, CY007310, CY007318, CY007326, CY007334, CY007342, CY007350,
CY007358, CY007366, CY007374, CY007382, CY007390, CY007398, CY007406, CY007414,
CY007422, CY007430, CY007438, CY007446, CY007454, CY007462, CY007470, CY007478,
CY007486, CY007494, CY007502, CY007510, CY007518, CY007526, CY007534, CY007542,
CY007550, CY007558, CY007566, CY007574, CY007582, CY007590, CY007598, CY007606,
CY007614, CY007622, CY007630, CY007638, CY007646, CY007654, CY007662, CY007670,
CY007678, CY007686, CY007694, CY007702, CY007710, CY007718, CY007726, CY007734,
CY007742, CY007750, CY007758, CY007766, CY007774, CY007782, CY007790, CY007798,
CY007806, CY007814, CY007822, CY007830, CY007838, CY007846, CY007854, CY007862,
CY007870, CY007878, CY007886, CY007894, CY007902, CY007910, CY007918, CY007926,
CY007934, CY007942, CY007950, CY007958, CY007966, CY007974, CY007982, CY007990,
CY007998, CY008006, CY008014, CY008022, CY008030, CY008038, CY008046, CY008054,
CY008062, CY008070, CY008078, CY008086, CY008094, CY008102, CY008110, CY008118,
CY008126, CY008134, CY008142, CY008151, CY008159, CY008167, CY008175, CY008183,
CY008191, CY008199, CY008207, CY008215, CY008223, CY008231, CY008239, CY008247,
CY008255, CY008263, CY008271, CY008279, CY008287, CY008295, CY008303, CY008311,
CY008319, CY008327, CY008335, CY008343, CY008351, CY008359, CY008367, CY008375,
CY008383, CY008391, CY008399, CY008407, CY008415, CY008423, CY008431, CY008439,
CY008447, CY008455, CY008463, CY008471, CY008479, CY008487, CY008495, CY008503,
CY008511, CY008519, CY008527, CY008535, CY008543, CY008551, CY008559, CY008567,
CY008575, CY008583, CY008591, CY008599, CY008607, CY008615, CY008623, CY008631,
CY008639, CY008647, CY008655, CY008663, CY008671, CY008679, CY008687, CY008695,
CY008703, CY008711, CY008719, CY008727, CY008735, CY008743, CY008751, CY008759,
CY008767, CY008775, CY008783, CY008791, CY008799, CY008807, CY008815, CY008823,
CY008831, CY008839, CY008847, CY008855, CY008863, CY008871, CY008879, CY008887,
CY008895, CY008903, CY008911, CY008919, CY008927, CY008935, CY008943, CY008951,
CY008959, CY008967, CY008975, CY008983, CY008991, CY008999, CY009007, CY009015,
CY009023, CY009031, CY009039, CY009047, CY009055, CY009063, CY009071, CY009079,
CY009087, CY009095, CY009103, CY009111, CY009119, CY009127, CY009135, CY009143,
CY009151, CY009159, CY009167, CY009175, CY009183, CY009191, CY009199, CY009207,
CY009215, CY009223, CY009231, CY009239, CY009247, CY009255, CY009263, CY009271,
CY009279, CY009287, CY009295, CY009319, CY009327, CY009335, CY009343, CY009351,
CY009359, CY009367, CY009391, CY009399, CY009407, CY009415, CY009423, CY009431,
CY009439, CY009447, CY009455, CY009463, CY009471, CY009479, CY009487, CY009495,
CY009503, CY009511, CY009519, CY009527, CY009535, CY009543, CY009551, CY009559,
CY009567, CY009575, CY009583, CY009591, CY009599, CY009607, CY009615, CY009623,
CY009639, CY009647, CY009655, CY009663, CY009671, CY009679, CY009687, CY009695,
CY009703, CY009711, CY009719, CY009727, CY009735, CY009743, CY009751, CY009759,
CY009767, CY009775, CY009783, CY009791, CY009799, CY009807, CY009815, CY009823,
CY009831, CY009839, CY009847, CY009855, CY009863, CY009871, CY009879, CY009887,
CY009903, CY009911, CY009927, CY009935, CY009943, CY009951, CY009959, CY009967,
CY009975, CY009983, CY009991, CY009999, CY010007, CY010015, CY010023, CY010031,
CY010039, CY010047, CY010055, CY010063, CY010071, CY010079, CY010087, CY010095,
CY010103, CY010111, CY010119, CY010127, CY010135, CY010143, CY010151, CY010159,
CY010167, CY010175, CY010183, CY010191, CY010199, CY010207, CY010215, CY010223,
CY010231, CY010239, CY010247, CY010255, CY010263, CY010271, CY010279, CY010287,
CY010295, CY010303, CY010311, CY010319, CY010327, CY010335, CY010343, CY010351,
CY010359, CY010367, CY010375, CY010383, CY010391, CY010399, CY010407, CY010415,
CY010423, CY010431, CY010439, CY010447, CY010455, CY010463, CY010471, CY010479,
CY010487, CY010495, CY010503, CY010511, CY010519, CY010527, CY010535, CY010543,
CY010551, CY010559, CY010591, CY010599, CY010607, CY010615, CY010623, CY010631,
CY010639, CY010647, CY010655, CY010663, CY010671, CY010679, CY010687, CY010695,
CY010703, CY010711, CY010719, CY010727, CY010735, CY010743, CY010751, CY010759,
CY010767, CY010775, CY010783, CY010791, CY010799, CY010807, CY010815, CY010823,
CY010831, CY010839, CY010847, CY010855, CY010863, CY010871, CY010879, CY010887,
CY010895, CY010903, CY010911, CY010919, CY010927, CY010935, CY010943, CY010951,
CY010959, CY010967, CY010975, CY010983, CY010991, CY010999, CY011007, CY011015,
CY011023, CY011067, CY011075, CY011083, CY011091, CY011123, CY011131, CY011139,
CY011147, CY011155, CY011163, CY011171, CY011179, CY011187, CY011195, CY011203,
CY011211, CY011219, CY011227, CY011235, CY011243, CY011259, CY011267, CY011275,
CY011283, CY011291, CY011299, CY011307, CY011315, CY011323, CY011331, CY011339,
CY011347, CY011355, CY011363, CY011371, CY011379, CY011387, CY011395, CY011403,
CY011411, CY011419, CY011427, CY011435, CY011443, CY011451, CY011459, CY011467,
CY011475, CY011483, CY011491, CY011499, CY011507, CY011515, CY011523, CY011531,
CY011539, CY011547, CY011555, CY011563, CY011571, CY011579, CY011587, CY011595,
CY011603, CY011611, CY011619, CY011627, CY011635, CY011643, CY011651, CY011659,
CY011667, CY011675, CY011683, CY011691, CY011699, CY011707, CY011715, CY011723,
CY011731, CY011739, CY011747, CY011755, CY011763, CY011771, CY011779, CY011787,
CY011795, CY011803, CY011811, CY011819, CY011827, CY011835, CY011843, CY011851,
CY011859, CY011867, CY011875, CY011883, CY011891, CY011899, CY011907, CY011915,
CY011923, CY011931, CY011939, CY011947, CY011955, CY011963, CY011971, CY011979,
CY011987, CY011995, CY012003, CY012011, CY012019, CY012027, CY012035, CY012043,
CY012051, CY012059, CY012067, CY012075, CY012083, CY012091, CY012099, CY012107,
CY012115, CY012123, CY012131, CY012139, CY012147, CY012155, CY012163, CY012171,
CY012179, CY012187, CY012195, CY012203, CY012211, CY012219, CY012227, CY012235,
CY012243, CY012251, CY012259, CY012267, CY012275, CY012283, CY012291, CY012299,
CY012307, CY012315, CY012323, CY012331, CY012339, CY012347, CY012355, CY012363,
CY012371, CY012379, CY012387, CY012395, CY012403, CY012411, CY012419, CY012427,
CY012435, CY012443, CY012451, CY012459, CY012467, CY012475, CY012483, CY012491,
CY012499, CY012507, CY012515, CY012523, CY012531, CY012539, CY012547, CY012555,
CY012563, CY012571, CY012579, CY012587, CY012595, CY012603, CY012611, CY012619,
CY012627, CY012635, CY012643, CY012651, CY012659, CY012667, CY012675, CY012683,
CY012691, CY012699, CY012707, CY012715, CY012723, CY012731, CY012739, CY012747,
CY012755, CY012763, CY012771, CY012779, CY012787, CY012795, CY012851, CY012859,
CY012867, CY012875, CY012883, CY012891, CY012899, CY012907, CY012915, CY012923,
CY012931, CY012939, CY012947, CY012955, CY012963, CY012971, CY012979, CY012987,
CY012995, CY013003, CY013011, CY013019, CY013027, CY013035, CY013043, CY013051,
CY013059, CY013067, CY013075, CY013083, CY013091, CY013099, CY013107, CY013115,
CY013123, CY013131, CY013139, CY013147, CY013155, CY013163, CY013171, CY013179,
CY013187, CY013195, CY013203, CY013211, CY013219, CY013227, CY013235, CY013243,
CY013274, CY013282, CY013290, CY013298, CY013306, CY013314, CY013322, CY013330,
CY013338, CY013346, CY013354, CY013362, CY013370, CY013378, CY013386, CY013392,
CY013400, CY013408, CY013416, CY013424, CY013432, CY013440, CY013448, CY013456,
CY013464, CY013472, CY013480, CY013488, CY013496, CY013504, CY013512, CY013520,
CY013528, CY013536, CY013544, CY013552, CY013560, CY013568, CY013576, CY013584,
CY013592, CY013600, CY013608, CY013616, CY013624, CY013632, CY013640, CY013648,
CY013656, CY013664, CY013672, CY013680, CY013688, CY013696, CY013704, CY013712,
CY013720, CY013728, CY013736, CY013744, CY013752, CY013760, CY013768, CY013776,
CY013784, CY013792, CY013800, CY013808, CY013816, CY013824, CY013832, CY013840,
CY013848, CY013856, CY013874, CY013882, CY013890, CY013898, CY013906, CY013914,
CY013922, CY013930, CY013938, CY013946, CY013954, CY013962, CY013970, CY013978,
CY013986, CY013994, CY014002, CY014010, CY014018, CY014026, CY014034, CY014042,
CY014050, CY014058, CY014066, CY014074, CY014082, CY014090, CY014098, CY014106,
CY014114, CY014122, CY014130, CY014138, CY014146, CY014154, CY014162, CY014172,
CY014178, CY014241, CY014242, CY014243, CY014244, CY014245, CY014246, CY014247,
CY014248, CY014249, CY014250, CY014251, CY014252, CY014253, CY014273, CY014281,
CY014289, CY014297, CY014304, CY014312, CY014371, CY014379, CY014387, CY014399,
CY014407, CY014415, CY014423, CY014431, CY014439, CY014447, CY014455, CY014463,
CY014471, CY014480, CY014487, CY014495, CY014503, CY014508, CY014516, CY014530,
CY014538, CY014544, CY014979, CY015009, CY015511, CY015519, CY015527, CY015535,
CY015543, CY015551, CY015559, CY015567, CY015575, CY015583, CY015591, CY015599,
CY015607, CY015615, CY015623, CY015631, CY015639, CY015647, CY015655, CY015663,
CY015671, CY015679, CY015687, CY015695, CY015703, CY015711, CY015719, CY015727,
CY015735, CY015743, CY015751, CY015759, CY015767, CY015775, CY015783, CY015791,
CY015799, CY015807, CY015815, CY015823, CY015831, CY015839, CY015847, CY015855,
CY015863, CY015871, CY015879, CY015887, CY015895, CY015903, CY015911, CY015919,
CY015927, CY015935, CY015943, CY015951, CY015959, CY015967, CY015975, CY015983,
CY015991, CY015999, CY016007, CY016015, CY016023, CY016031, CY016039, CY016047,
CY016055, CY016063, CY016071, CY016079, CY016087, CY016095, CY016103, CY016111,
CY016119, CY016199, CY016207, CY016215, CY016231, CY016239, CY016247, CY016255,
CY016263, CY016271, CY016406, CY016430, CY016438, CY016446, CY016454, CY016462,
CY016470, CY016478, CY016486, CY016494, CY016502, CY016510, CY016518, CY016526,
CY016534, CY016542, CY016550, CY016558, CY016566, CY016574, CY016582, CY016590,
CY016598, CY016606, CY016630, CY016638, CY016646, CY016654, CY016662, CY016670,
CY016678, CY016686, CY016694, CY016702, CY016710, CY016718, CY016726, CY016734,
CY016742, CY016750, CY016758, CY016766, CY016774, CY016966, CY016974, CY016982,
CY016990, CY016998, CY017006, CY017014, CY017022, CY017086, CY017094, CY017102,
CY017110, CY017118, CY017126, CY017134, CY017142, CY017150, CY017158, CY017166,
CY017174, CY017198, CY017206, CY017214, CY017222, CY017230, CY017238, CY017246,
CY017254, CY017262, CY017270, CY017286, CY017294, CY017302, CY017310, CY017318,
CY017326, CY017334, CY017342, CY017350, CY017358, CY017366, CY017374, CY017382,
CY017390, CY017398, CY017422, CY017430, CY017438, CY017446, CY017454, CY017462,
CY017470, CY017478, CY017486, CY017494, CY017502, CY017510, CY017518, CY017526,
CY017534, CY017542, CY017550, CY017558, CY017566, CY017574, CY017582, CY017590,
CY017598, CY017606, CY017614, CY017622, CY017630, CY017639, CY017647, CY017655,
CY017663, CY017671, CY017679, CY017689, D00051, D00599, D00600, D00601, D00602,
D00603, DQ099775, DQ099776, DQ099779, DQ099780, DQ099781, DQ099782, DQ099783,
DQ226139, DQ249264, DQ360840, DQ372594, DQ415327, DQ415328, DQ415329, DQ415330,
DQ415331, DQ415332, DQ415333, DQ415334, DQ415335, DQ415336, DQ415337, DQ469959,
DQ487330, DQ487339, DQ493156, DQ493157, DQ493158, DQ493159, DQ493160, DQ493161,
DQ493162, DQ493163, DQ493164, DQ493165, DQ493166, DQ508826, DQ508834, DQ508842,
DQ508850, DQ508858, DQ508866, DQ508874, DQ508882, DQ508890, DQ508898, DQ508906,
DQ508930, DQ535727, DQ643812, EF101752, ISDN125786, ISDN125874, ISDN128029,
ISDN129533, ISDN129583, ISDN130368, ISDN130376, ISDN130915, ISDN132409,
ISDN132417, ISDN133319, ISDN133326, ISDN133359, ISDN133367, ISDN133373,
ISDN13423, ISDN13442, ISDN13443, ISDN13444, ISDN136844, ISDN136852, ISDN137814,
ISDN137815, ISDN137816, ISDN137817, ISDN137818, ISDN137819, ISDN137820,
ISDN137821, ISDN137822, ISDN137823, ISDN137824, ISDN137825, ISDN137826,
ISDN137827, ISDN138751, ISDN138767, ISDN138775, ISDN140077, ISDN140078,
ISDN140079, ISDN140080, ISDN140081, ISDN140084, ISDN140085, ISDN140813,
ISDN140821, ISDN140836, ISDN140844, ISDN140852, ISDN140860, ISDN140867,
ISDN140903, ISDN140904, ISDN140905, ISDN140929, ISDN181366, ISDN183300,
ISDN183308, ISDN183316, ISDN183704, ISDN183712, ISDN183720, ISDN183728,
ISDN183736, ISDN183744, ISDN183752, ISDN183760, ISDN183768, ISDN183776,
ISDN183785, ISDN185500, ISDN187424, ISDN187432, ISDN187440, ISDN187448,
ISDN187456, ISDN188294, ISDN188295, ISDN188296, ISDN188297, ISDN188298,
ISDN188299, ISDN188300, ISDN188301, ISDN188302, ISDN188304, ISDN188305,
ISDN188306, ISDN188307, ISDN188308, ISDN188309, ISDN188312, ISDN188313,
ISDN188315, ISDN188316, ISDN188317, ISDN188318, ISDN188319, ISDN188320,
ISDN188321, ISDN204139, ISDN204147, ISDN204155, ISDN207101, ISDN207109,
ISDN40086, ISDN41067, J02137, L07340, L07341, L07342, L07343, L07344, L07345, L07346,
L07347, L07349, L07350, L07351, L07352, L07353, L07354, L07355, L07356, L07357,
L07358, L07359, L07360, L07361, L07362, L07363, L07364, L07365, L07366, L07367,
L07368, L07369, L07370, L07371, L07372, L07373, L07374, L24394, M22577, M23976,
M30746, M38279, M59329, M59330, M59331, M59332, M59333, M59334, M63749, M63750,
M63751, M63752, M63753, M63754, M63755, M76602, M76604, M76605, M76606, M76610,
M81571, M81577, M81583, NC_002019, U02086, U71144, U71145, U71146, U71147, V01084,
X15890, X51972, Z54290, Z54291, Z54292
6: GenBank and LANL accession numbers for NA sequences (segment 6) used in this
analysis.
AB101671, AB101672, AB101673, AB101674, AB101675, AB124653, AB124654, AB124655,
AB124656, AB124657, AB124658, AB124659, AB124660, AB124661, AB124662, AB124663,
AB124664, AB126623, AB126631, AB212056, AB239126, AB262465, AF028708, AF036357,
AF038260, AF038261, AF038262, AF038263, AF038264, AF038265, AF046089, AF084271,
AF084272, AF084273, AF084274, AF084275, AF102656, AF102657, AF102658, AF102659,
AF102660, AF102661, AF102662, AF102663, AF102664, AF102665, AF102666, AF102667,
AF102668, AF102669, AF102670, AF250356, AF250357, AF250363, AF250365, AF296752,
AF316805, AF316806, AF316807, AF316808, AF316809, AF316810, AF316811, AF316812,
AF316814, AF316815, AF316816, AF330819, AF342820, AF348184, AF348185, AF348186,
AF348187, AF382329, AF382330, AF382331, AF382332, AF386761, AF386762, AF386763,
AF386764, AF389120, AF398868, AF398869, AF398872, AF494252, AF494253, AF494254,
AF503463, AF503464, AF503465, AF503466, AF503467, AF503468, AF503469, AF503470,
AF503471, AF503472, AF533730, AF533731, AF533732, AF533733, AF533734, AF533735,
AF533736, AF533737, AF533738, AF533739, AF533740, AF533741, AF533742, AF533743,
AF533744, AF533745, AF533746, AF533747, AF533748, AF533749, AF533750, AF533989,
AF533990, AF533991, AF533992, AF533993, AF533994, AF533995, AF533996, AF533997,
AF533998, AF533999, AF534000, AF534001, AJ006953, AJ006954, AJ291403, AJ293923,
AJ307599, AJ307600, AJ307601, AJ307602, AJ307603, AJ307604, AJ307605, AJ307606,
AJ307607, AJ307608, AJ307609, AJ307610, AJ307611, AJ307612, AJ307613, AJ307614,
AJ307615, AJ307616, AJ307617, AJ307618, AJ307619, AJ307620, AJ307621, AJ307622,
AJ307623, AJ307624, AJ307625, AJ307626, AJ307627, AJ307628, AJ307629, AJ316063,
AJ404628, AJ404629, AJ457931, AJ457932, AJ457933, AJ457934, AJ457935, AJ457936,
AJ457937, AJ457938, AJ457939, AJ457940, AJ457941, AJ457942, AJ457943, AJ457944,
AJ457945, AJ457946, AJ457956, AJ457957, AJ457958, AJ457959, AJ457960, AJ457961,
AJ457962, AJ457963, AJ457964, AJ457965, AJ457966, AJ489846, AJ489847, AJ489848,
AJ489849, AJ489850, AJ489851, AJ518091, AJ518092, AJ518093, AJ518094, AJ518095,
AJ518096, AJ518097, AJ518098, AJ518099, AJ518100, AJ518101, AJ518102, AJ518104,
AJ867075, AY043022, AY043024, AY122326, AY122327, AY209895, AY209896, AY209897,
AY209898, AY209899, AY209900, AY209901, AY209902, AY209903, AY209904, AY209905,
AY209906, AY209907, AY209908, AY209909, AY209910, AY209911, AY209912, AY209913,
AY209914, AY209915, AY209916, AY209917, AY209918, AY209919, AY209920, AY209921,
AY209922, AY209923, AY209924, AY209925, AY209926, AY209927, AY209928, AY209929,
AY209930, AY209931, AY209932, AY209933, AY210105, AY210106, AY210107, AY210108,
AY210109, AY210110, AY210111, AY210112, AY210113, AY210114, AY210115, AY210116,
AY210117, AY210118, AY210119, AY210120, AY210121, AY210122, AY210123, AY210124,
AY210125, AY210126, AY210127, AY210128, AY210129, AY210130, AY210131, AY210132,
AY210133, AY210134, AY210135, AY210136, AY271795, AY297140, AY297141, AY297142,
AY297143, AY297144, AY297145, AY297146, AY297147, AY297148, AY297149, AY297150,
AY297151, AY297152, AY297153, AY310407, AY310408, AY310409, AY310410, AY310411,
AY310412, AY531006, AY531007, AY531008, AY531009, AY531010, AY531011, AY531012,
AY531013, AY531014, AY531015, AY531016, AY531017, AY531018, AY531019, AY531020,
AY531021, AY531022, AY531023, AY531024, AY531025, AY531026, AY531027, AY531028,
AY531034, AY531036, AY555151, AY555152, AY575881, AY575882, AY589662, AY589663,
AY589664, AY589665, AY589666, AY589667, AY589668, AY589669, AY589670, AY589671,
AY589672, AY589673, AY589674, AY589675, AY589676, AY643088, AY643089, AY651445,
AY651446, AY651447, AY651448, AY679513, AY818141, AY884285, AY884286, AY904335,
AY947477, CY000003, CY000011, CY000019, CY000027, CY000035, CY000043, CY000051,
CY000059, CY000067, CY000075, CY000083, CY000091, CY000099, CY000107, CY000115,
CY000123, CY000131, CY000139, CY000147, CY000155, CY000163, CY000171, CY000179,
CY000187, CY000195, CY000203, CY000211, CY000219, CY000227, CY000235, CY000243,
CY000251, CY000259, CY000267, CY000275, CY000283, CY000291, CY000299, CY000307,
CY000315, CY000323, CY000331, CY000339, CY000347, CY000355, CY000363, CY000371,
CY000379, CY000387, CY000395, CY000403, CY000411, CY000419, CY000427, CY000435,
CY000443, CY000451, CY000459, CY000467, CY000475, CY000483, CY000491, CY000499,
CY000507, CY000515, CY000523, CY000531, CY000539, CY000547, CY000555, CY000563,
CY000571, CY000578, CY000587, CY000595, CY000603, CY000611, CY000619, CY000627,
CY000635, CY000643, CY000651, CY000659, CY000667, CY000675, CY000683, CY000691,
CY000699, CY000707, CY000715, CY000723, CY000731, CY000739, CY000747, CY000755,
CY000763, CY000771, CY000779, CY000787, CY000795, CY000803, CY000811, CY000819,
CY000827, CY000835, CY000843, CY000851, CY000859, CY000867, CY000875, CY000883,
CY000891, CY000903, CY000911, CY000919, CY000927, CY000935, CY000943, CY000951,
CY000959, CY000967, CY000975, CY000983, CY000991, CY000999, CY001007, CY001015,
CY001023, CY001031, CY001039, CY001047, CY001055, CY001063, CY001066, CY001074,
CY001082, CY001090, CY001098, CY001106, CY001114, CY001122, CY001130, CY001138,
CY001146, CY001154, CY001162, CY001170, CY001178, CY001186, CY001199, CY001207,
CY001215, CY001223, CY001231, CY001239, CY001247, CY001255, CY001263, CY001271,
CY001279, CY001287, CY001295, CY001303, CY001311, CY001319, CY001327, CY001335,
CY001343, CY001351, CY001359, CY001367, CY001375, CY001383, CY001399, CY001407,
CY001415, CY001423, CY001431, CY001439, CY001447, CY001455, CY001463, CY001471,
CY001479, CY001487, CY001495, CY001506, CY001514, CY001522, CY001530, CY001538,
CY001546, CY001554, CY001562, CY001570, CY001578, CY001586, CY001594, CY001602,
CY001610, CY001618, CY001626, CY001634, CY001642, CY001650, CY001658, CY001666,
CY001674, CY001682, CY001690, CY001698, CY001706, CY001714, CY001722, CY001730,
CY001738, CY001746, CY001754, CY001762, CY001770, CY001778, CY001786, CY001794,
CY001802, CY001810, CY001818, CY001826, CY001834, CY001842, CY001850, CY001858,
CY001866, CY001874, CY001882, CY001890, CY001898, CY001906, CY001914, CY001922,
CY001930, CY001938, CY001946, CY001954, CY001962, CY001970, CY001978, CY001986,
CY001994, CY002002, CY002010, CY002018, CY002026, CY002034, CY002042, CY002050,
CY002058, CY002066, CY002074, CY002082, CY002090, CY002098, CY002106, CY002114,
CY002122, CY002130, CY002138, CY002146, CY002154, CY002162, CY002170, CY002178,
CY002186, CY002194, CY002202, CY002210, CY002218, CY002226, CY002234, CY002242,
CY002250, CY002258, CY002266, CY002274, CY002282, CY002290, CY002298, CY002306,
CY002314, CY002330, CY002338, CY002346, CY002354, CY002362, CY002370, CY002378,
CY002386, CY002394, CY002402, CY002410, CY002418, CY002426, CY002434, CY002442,
CY002450, CY002458, CY002466, CY002474, CY002482, CY002490, CY002498, CY002506,
CY002514, CY002522, CY002530, CY002538, CY002546, CY002554, CY002562, CY002570,
CY002578, CY002586, CY002594, CY002602, CY002610, CY002618, CY002626, CY002634,
CY002642, CY002650, CY002658, CY002666, CY002674, CY002682, CY002690, CY002698,
CY002706, CY002714, CY002722, CY002730, CY002738, CY002746, CY002754, CY002762,
CY002770, CY002778, CY002786, CY002794, CY002802, CY002810, CY002818, CY002908,
CY002916, CY002924, CY002932, CY002940, CY002948, CY002956, CY002964, CY002971,
CY002978, CY002986, CY002994, CY003002, CY003010, CY003018, CY003026, CY003034,
CY003042, CY003050, CY003058, CY003066, CY003074, CY003082, CY003090, CY003098,
CY003106, CY003114, CY003122, CY003129, CY003138, CY003146, CY003154, CY003162,
CY003170, CY003178, CY003186, CY003194, CY003202, CY003210, CY003218, CY003226,
CY003234, CY003242, CY003250, CY003258, CY003266, CY003274, CY003282, CY003290,
CY003298, CY003306, CY003314, CY003322, CY003330, CY003338, CY003346, CY003354,
CY003370, CY003378, CY003386, CY003394, CY003402, CY003410, CY003418, CY003426,
CY003434, CY003442, CY003450, CY003458, CY003466, CY003474, CY003482, CY003490,
CY003498, CY003506, CY003514, CY003522, CY003530, CY003538, CY003546, CY003554,
CY003562, CY003570, CY003578, CY003586, CY003594, CY003602, CY003610, CY003618,
CY003626, CY003634, CY003642, CY003650, CY003658, CY003666, CY003674, CY003682,
CY003690, CY003698, CY003706, CY003714, CY003722, CY003730, CY003738, CY003746,
CY003754, CY003763, CY003771, CY003779, CY003787, CY003795, CY003803, CY003811,
CY003819, CY003827, CY003835, CY006046, CY006054, CY006062, CY006070, CY006078,
CY006086, CY006094, CY006101, CY006109, CY006117, CY006125, CY006133, CY006141,
CY006149, CY006157, CY006165, CY006173, CY006181, CY006189, CY006197, CY006205,
CY006213, CY006221, CY006229, CY006237, CY006245, CY006253, CY006261, CY006269,
CY006277, CY006285, CY006293, CY006301, CY006309, CY006317, CY006325, CY006333,
CY006341, CY006349, CY006357, CY006365, CY006373, CY006381, CY006389, CY006397,
CY006405, CY006413, CY006421, CY006429, CY006437, CY006445, CY006453, CY006461,
CY006469, CY006477, CY006485, CY006493, CY006501, CY006509, CY006517, CY006525,
CY006533, CY006541, CY006549, CY006557, CY006565, CY006573, CY006581, CY006589,
CY006597, CY006605, CY006613, CY006621, CY006629, CY006637, CY006661, CY006669,
CY006677, CY006685, CY006693, CY006701, CY006709, CY006717, CY006725, CY006733,
CY006741, CY006749, CY006757, CY006765, CY006773, CY006781, CY006789, CY006797,
CY006805, CY006813, CY006821, CY006829, CY006837, CY006845, CY006853, CY006861,
CY006869, CY006877, CY006885, CY006893, CY006901, CY006909, CY006917, CY006925,
CY006933, CY006941, CY006949, CY006957, CY006965, CY006973, CY006981, CY006989,
CY006997, CY007005, CY007013, CY007021, CY007029, CY007037, CY007045, CY007053,
CY007061, CY007069, CY007077, CY007085, CY007093, CY007101, CY007109, CY007117,
CY007125, CY007133, CY007141, CY007149, CY007157, CY007165, CY007173, CY007181,
CY007189, CY007197, CY007205, CY007213, CY007221, CY007229, CY007237, CY007245,
CY007253, CY007261, CY007269, CY007277, CY007285, CY007293, CY007301, CY007309,
CY007317, CY007325, CY007333, CY007341, CY007349, CY007357, CY007365, CY007373,
CY007381, CY007389, CY007397, CY007405, CY007413, CY007421, CY007429, CY007437,
CY007445, CY007453, CY007461, CY007469, CY007477, CY007485, CY007493, CY007501,
CY007509, CY007517, CY007525, CY007533, CY007541, CY007549, CY007557, CY007565,
CY007573, CY007581, CY007589, CY007597, CY007605, CY007613, CY007621, CY007629,
CY007637, CY007645, CY007653, CY007661, CY007669, CY007677, CY007685, CY007693,
CY007701, CY007709, CY007717, CY007725, CY007733, CY007741, CY007749, CY007757,
CY007765, CY007773, CY007781, CY007789, CY007797, CY007805, CY007813, CY007821,
CY007829, CY007837, CY007845, CY007853, CY007861, CY007869, CY007877, CY007885,
CY007893, CY007901, CY007909, CY007917, CY007925, CY007933, CY007941, CY007949,
CY007957, CY007965, CY007973, CY007981, CY007989, CY007997, CY008005, CY008013,
CY008021, CY008029, CY008037, CY008045, CY008053, CY008061, CY008069, CY008077,
CY008085, CY008093, CY008101, CY008109, CY008117, CY008125, CY008133, CY008141,
CY008150, CY008158, CY008166, CY008174, CY008182, CY008190, CY008198, CY008206,
CY008214, CY008222, CY008230, CY008238, CY008246, CY008254, CY008262, CY008270,
CY008278, CY008286, CY008294, CY008302, CY008310, CY008318, CY008326, CY008334,
CY008342, CY008350, CY008358, CY008366, CY008374, CY008382, CY008390, CY008398,
CY008406, CY008414, CY008422, CY008430, CY008438, CY008446, CY008454, CY008462,
CY008470, CY008478, CY008486, CY008494, CY008502, CY008510, CY008518, CY008526,
CY008534, CY008542, CY008550, CY008558, CY008566, CY008574, CY008582, CY008590,
CY008598, CY008606, CY008614, CY008622, CY008630, CY008638, CY008646, CY008654,
CY008662, CY008670, CY008678, CY008686, CY008694, CY008702, CY008710, CY008718,
CY008726, CY008734, CY008742, CY008750, CY008758, CY008766, CY008774, CY008782,
CY008790, CY008798, CY008806, CY008814, CY008822, CY008830, CY008838, CY008846,
CY008854, CY008862, CY008870, CY008878, CY008886, CY008894, CY008902, CY008910,
CY008918, CY008926, CY008934, CY008942, CY008950, CY008958, CY008966, CY008974,
CY008982, CY008990, CY008998, CY009006, CY009014, CY009022, CY009030, CY009038,
CY009046, CY009054, CY009062, CY009070, CY009078, CY009086, CY009094, CY009102,
CY009110, CY009118, CY009126, CY009134, CY009142, CY009150, CY009158, CY009166,
CY009174, CY009182, CY009190, CY009198, CY009206, CY009214, CY009222, CY009230,
CY009238, CY009246, CY009254, CY009262, CY009270, CY009278, CY009286, CY009294,
CY009318, CY009326, CY009334, CY009342, CY009350, CY009358, CY009366, CY009390,
CY009398, CY009406, CY009414, CY009422, CY009430, CY009438, CY009446, CY009454,
CY009462, CY009470, CY009478, CY009486, CY009494, CY009502, CY009510, CY009518,
CY009526, CY009534, CY009542, CY009550, CY009558, CY009566, CY009574, CY009582,
CY009590, CY009598, CY009606, CY009614, CY009622, CY009638, CY009646, CY009654,
CY009662, CY009670, CY009678, CY009686, CY009694, CY009702, CY009710, CY009718,
CY009726, CY009734, CY009742, CY009750, CY009758, CY009766, CY009774, CY009782,
CY009790, CY009798, CY009806, CY009814, CY009822, CY009830, CY009838, CY009846,
CY009854, CY009862, CY009870, CY009878, CY009886, CY009902, CY009910, CY009926,
CY009934, CY009942, CY009950, CY009958, CY009966, CY009974, CY009982, CY009990,
CY009998, CY010006, CY010014, CY010022, CY010030, CY010038, CY010046, CY010054,
CY010062, CY010070, CY010078, CY010086, CY010094, CY010102, CY010110, CY010118,
CY010126, CY010134, CY010142, CY010150, CY010158, CY010166, CY010174, CY010182,
CY010190, CY010198, CY010206, CY010214, CY010222, CY010230, CY010238, CY010246,
CY010254, CY010262, CY010270, CY010278, CY010286, CY010294, CY010302, CY010310,
CY010318, CY010326, CY010334, CY010342, CY010350, CY010358, CY010366, CY010374,
CY010382, CY010390, CY010398, CY010406, CY010414, CY010422, CY010430, CY010438,
CY010446, CY010454, CY010462, CY010470, CY010478, CY010486, CY010494, CY010502,
CY010510, CY010518, CY010526, CY010534, CY010542, CY010550, CY010558, CY010590,
CY010598, CY010606, CY010614, CY010622, CY010630, CY010638, CY010646, CY010654,
CY010662, CY010670, CY010678, CY010686, CY010694, CY010702, CY010710, CY010718,
CY010726, CY010734, CY010742, CY010750, CY010758, CY010766, CY010774, CY010782,
CY010790, CY010798, CY010806, CY010814, CY010822, CY010830, CY010838, CY010846,
CY010854, CY010862, CY010870, CY010878, CY010886, CY010894, CY010902, CY010910,
CY010918, CY010926, CY010934, CY010942, CY010950, CY010958, CY010966, CY010974,
CY010982, CY010990, CY010998, CY011006, CY011014, CY011022, CY011066, CY011074,
CY011082, CY011090, CY011122, CY011130, CY011138, CY011146, CY011154, CY011162,
CY011170, CY011178, CY011186, CY011194, CY011202, CY011210, CY011218, CY011226,
CY011234, CY011242, CY011258, CY011266, CY011274, CY011282, CY011290, CY011298,
CY011306, CY011314, CY011322, CY011330, CY011338, CY011346, CY011354, CY011362,
CY011370, CY011378, CY011386, CY011394, CY011402, CY011410, CY011418, CY011426,
CY011434, CY011442, CY011450, CY011458, CY011466, CY011474, CY011482, CY011490,
CY011498, CY011506, CY011514, CY011522, CY011530, CY011538, CY011546, CY011554,
CY011562, CY011570, CY011578, CY011586, CY011594, CY011602, CY011610, CY011618,
CY011626, CY011634, CY011642, CY011650, CY011658, CY011666, CY011674, CY011682,
CY011690, CY011698, CY011706, CY011714, CY011722, CY011730, CY011738, CY011746,
CY011754, CY011762, CY011770, CY011778, CY011786, CY011794, CY011802, CY011810,
CY011818, CY011826, CY011834, CY011842, CY011850, CY011858, CY011866, CY011874,
CY011882, CY011890, CY011898, CY011906, CY011914, CY011922, CY011930, CY011938,
CY011946, CY011954, CY011962, CY011970, CY011978, CY011986, CY011994, CY012002,
CY012010, CY012018, CY012026, CY012034, CY012042, CY012050, CY012058, CY012066,
CY012074, CY012082, CY012090, CY012098, CY012106, CY012114, CY012122, CY012130,
CY012138, CY012146, CY012154, CY012162, CY012170, CY012178, CY012186, CY012194,
CY012202, CY012210, CY012218, CY012226, CY012234, CY012242, CY012250, CY012258,
CY012266, CY012274, CY012282, CY012290, CY012298, CY012306, CY012314, CY012322,
CY012330, CY012338, CY012346, CY012354, CY012362, CY012370, CY012378, CY012386,
CY012394, CY012402, CY012410, CY012418, CY012426, CY012434, CY012442, CY012450,
CY012458, CY012466, CY012474, CY012482, CY012490, CY012498, CY012506, CY012514,
CY012522, CY012530, CY012538, CY012546, CY012554, CY012562, CY012570, CY012578,
CY012586, CY012594, CY012602, CY012610, CY012618, CY012626, CY012634, CY012642,
CY012650, CY012658, CY012666, CY012674, CY012682, CY012690, CY012698, CY012706,
CY012714, CY012722, CY012730, CY012738, CY012746, CY012754, CY012762, CY012770,
CY012778, CY012786, CY012794, CY012850, CY012858, CY012866, CY012874, CY012882,
CY012890, CY012898, CY012906, CY012914, CY012922, CY012930, CY012938, CY012946,
CY012954, CY012962, CY012970, CY012978, CY012986, CY012994, CY013002, CY013010,
CY013018, CY013026, CY013034, CY013042, CY013050, CY013058, CY013066, CY013074,
CY013082, CY013090, CY013098, CY013106, CY013114, CY013122, CY013130, CY013138,
CY013146, CY013154, CY013162, CY013170, CY013178, CY013186, CY013194, CY013202,
CY013210, CY013218, CY013226, CY013234, CY013242, CY013273, CY013281, CY013289,
CY013297, CY013305, CY013313, CY013321, CY013329, CY013337, CY013345, CY013353,
CY013361, CY013369, CY013377, CY013385, CY013391, CY013399, CY013407, CY013415,
CY013423, CY013431, CY013439, CY013447, CY013455, CY013463, CY013471, CY013479,
CY013487, CY013495, CY013503, CY013511, CY013519, CY013527, CY013535, CY013543,
CY013551, CY013559, CY013567, CY013575, CY013583, CY013591, CY013599, CY013607,
CY013615, CY013623, CY013631, CY013639, CY013647, CY013655, CY013663, CY013671,
CY013679, CY013687, CY013695, CY013703, CY013711, CY013719, CY013727, CY013735,
CY013743, CY013751, CY013759, CY013767, CY013775, CY013783, CY013791, CY013799,
CY013807, CY013815, CY013823, CY013831, CY013839, CY013847, CY013855, CY013873,
CY013881, CY013889, CY013897, CY013905, CY013913, CY013921, CY013929, CY013937,
CY013945, CY013953, CY013961, CY013969, CY013977, CY013985, CY013993, CY014001,
CY014009, CY014017, CY014025, CY014033, CY014041, CY014049, CY014057, CY014065,
CY014073, CY014081, CY014089, CY014097, CY014105, CY014113, CY014121, CY014129,
CY014137, CY014145, CY014153, CY014161, CY014179, CY014227, CY014228, CY014229,
CY014230, CY014231, CY014232, CY014233, CY014235, CY014236, CY014237, CY014238,
CY014239, CY014240, CY014274, CY014282, CY014290, CY014298, CY014305, CY014313,
CY014370, CY014378, CY014386, CY014398, CY014406, CY014414, CY014422, CY014430,
CY014438, CY014446, CY014454, CY014462, CY014470, CY014486, CY014494, CY014502,
CY014507, CY014515, CY014531, CY014539, CY014545, CY014978, CY015008, CY015510,
CY015518, CY015526, CY015534, CY015542, CY015550, CY015558, CY015566, CY015574,
CY015582, CY015590, CY015598, CY015606, CY015614, CY015622, CY015630, CY015638,
CY015646, CY015654, CY015662, CY015670, CY015678, CY015686, CY015694, CY015702,
CY015710, CY015718, CY015726, CY015734, CY015742, CY015750, CY015758, CY015766,
CY015774, CY015782, CY015790, CY015798, CY015806, CY015814, CY015822, CY015830,
CY015838, CY015846, CY015854, CY015862, CY015870, CY015878, CY015886, CY015894,
CY015902, CY015910, CY015918, CY015926, CY015934, CY015942, CY015950, CY015958,
CY015966, CY015974, CY015982, CY015990, CY015998, CY016006, CY016014, CY016022,
CY016030, CY016038, CY016046, CY016054, CY016062, CY016070, CY016078, CY016086,
CY016094, CY016102, CY016110, CY016118, CY016198, CY016206, CY016214, CY016230,
CY016238, CY016246, CY016254, CY016262, CY016270, CY016351, CY016353, CY016356,
CY016405, CY016429, CY016437, CY016445, CY016453, CY016461, CY016469, CY016477,
CY016485, CY016493, CY016501, CY016509, CY016517, CY016525, CY016533, CY016541,
CY016549, CY016557, CY016565, CY016573, CY016581, CY016589, CY016597, CY016605,
CY016629, CY016637, CY016645, CY016653, CY016661, CY016669, CY016677, CY016685,
CY016693, CY016701, CY016709, CY016717, CY016725, CY016733, CY016741, CY016749,
CY016757, CY016765, CY016773, CY016965, CY016973, CY016981, CY016989, CY016997,
CY017005, CY017013, CY017021, CY017085, CY017093, CY017101, CY017109, CY017117,
CY017125, CY017133, CY017141, CY017149, CY017157, CY017165, CY017173, CY017197,
CY017205, CY017213, CY017221, CY017229, CY017237, CY017245, CY017253, CY017261,
CY017269, CY017285, CY017293, CY017301, CY017309, CY017317, CY017325, CY017333,
CY017341, CY017349, CY017357, CY017365, CY017373, CY017381, CY017389, CY017397,
CY017421, CY017429, CY017437, CY017445, CY017453, CY017461, CY017469, CY017477,
CY017485, CY017493, CY017501, CY017509, CY017517, CY017525, CY017533, CY017541,
CY017549, CY017557, CY017565, CY017573, CY017581, CY017589, CY017597, CY017605,
CY017613, CY017621, CY017629, CY017640, CY017648, CY017656, CY017664, CY017672,
CY017680, CY017690, D10164, D21186, D31944, D31945, D31948, D31950, DQ059384,
DQ085795, DQ085796, DQ085797, DQ085798, DQ085799, DQ085800, DQ090706, DQ090707,
DQ090708, DQ090709, DQ090710, DQ091199, DQ094286, DQ094290, DQ094291, DQ094292,
DQ226128, DQ227437, DQ227439, DQ227440, DQ227441, DQ227442, DQ227443, DQ227444,
DQ227445, DQ227446, DQ227447, DQ227448, DQ249252, DQ249253, DQ249254, DQ249255,
DQ249256, DQ249257, DQ249258, DQ250159, DQ250160, DQ250161, DQ250162, DQ250163,
DQ250164, DQ250165, DQ345546, DQ360836, DQ372593, DQ415338, DQ415339, DQ415340,
DQ415341, DQ415342, DQ415343, DQ415344, DQ415345, DQ415346, DQ415347, DQ415348,
DQ469960, DQ487331, DQ487337, DQ493068, DQ493069, DQ493071, DQ493072, DQ493073,
DQ493074, DQ493075, DQ493076, DQ493077, DQ493078, DQ508827, DQ508835, DQ508843,
DQ508851, DQ508859, DQ508867, DQ508875, DQ508883, DQ508891, DQ508899, DQ508907,
DQ508931, DQ535726, DQ643810, DQ885611, DQ885613, DQ885615, DQ885617, DQ885620,
DQ986135, EF101743, EF101756, ISD3BF2A5CF, ISD3BF2A6C1, ISD3BF2A6F6,
ISD3BF2A72F, ISD3BF2A773, ISD3BF2A798, ISD3BF2A7C9, ISD3BF2A7F9,
ISD3BF2A81C, ISDN110641, ISDN110642, ISDN110643, ISDN110644, ISDN110661,
ISDN110662, ISDN110663, ISDN110664, ISDN110665, ISDN110666, ISDN110667,
ISDN110668, ISDN110669, ISDN110670, ISDN110893, ISDN110894, ISDN110920,
ISDN110939, ISDN117767, ISDN117782, ISDN117783, ISDN117792, ISDN119679,
ISDN119865, ISDN122818, ISDN12305, ISDN12306, ISDN12307, ISDN12308, ISDN12309,
ISDN12310, ISDN12311, ISDN12312, ISDN12313, ISDN12314, ISDN12315, ISDN12316,
ISDN12317, ISDN12318, ISDN12319, ISDN12320, ISDN12321, ISDN12324, ISDN12325,
ISDN12326, ISDN12327, ISDN12328, ISDN12329, ISDN12330, ISDN12332, ISDN12333,
ISDN12334, ISDN12335, ISDN12336, ISDN12337, ISDN125784, ISDN125875, ISDN126657,
ISDN126658, ISDN126665, ISDN126667, ISDN126669, ISDN127328, ISDN127338,
ISDN128027, ISDN12936, ISDN129528, ISDN129584, ISDN130367, ISDN130375,
ISDN130914, ISDN131234, ISDN131235, ISDN132196, ISDN132197, ISDN132198,
ISDN132199, ISDN13223, ISDN13224, ISDN13225, ISDN13226, ISDN132408, ISDN132416,
ISDN133097, ISDN133104, ISDN133317, ISDN133324, ISDN133358, ISDN133366,
ISDN13424, ISDN136490, ISDN137800, ISDN137801, ISDN137802, ISDN137803,
ISDN137804, ISDN137805, ISDN137806, ISDN137807, ISDN137808, ISDN137809,
ISDN137810, ISDN137811, ISDN137812, ISDN137813, ISDN138750, ISDN138766,
ISDN138774, ISDN140066, ISDN140067, ISDN140068, ISDN140069, ISDN140070,
ISDN140071, ISDN140072, ISDN140073, ISDN140812, ISDN140820, ISDN140837,
ISDN140845, ISDN140853, ISDN140861, ISDN140868, ISDN140900, ISDN140902,
ISDN140928, ISDN181367, ISDN183299, ISDN183307, ISDN183315, ISDN183703,
ISDN183711, ISDN183719, ISDN183727, ISDN183735, ISDN183743, ISDN183751,
ISDN183759, ISDN183767, ISDN183775, ISDN185497, ISDN186518, ISDN186519,
ISDN186520, ISDN186521, ISDN186523, ISDN186524, ISDN186525, ISDN186526,
ISDN186527, ISDN186528, ISDN186529, ISDN186530, ISDN186532, ISDN186533,
ISDN186534, ISDN186535, ISDN186537, ISDN186538, ISDN186539, ISDN186540,
ISDN186541, ISDN186545, ISDN186546, ISDN187423, ISDN187431, ISDN187447,
ISDN20056, ISDN204138, ISDN204146, ISDN204154, ISDN207100, ISDN207108,
ISDN214633, ISDN214635, ISDN214637, ISDN214639, ISDN214641, ISDN214643,
ISDN214646, ISDN214649, ISDN214652, ISDN214655, ISDN214658, ISDN214661,
ISDN214666, ISDN214669, ISDN214672, ISDN214675, ISDN214678, ISDN214681,
ISDN214684, ISDN214687, ISDN214690, ISDN214693, ISDN219942, ISDN219945,
ISDN219948, ISDN219951, ISDN219954, ISDN33627, ISDN38703, ISDN38704, ISDN48789,
ISDN48790, ISDN48791, ISDN48792, ISDN48793, ISDN68678, ISDN68692, ISDN68693,
ISDN68694, ISDN68695, ISDN68696, ISDN68697, ISDN68698, ISDN68699, ISDN69440,
ISDN69610, J02136, J02156, J02168, J02173, J02177, K01150, K01393, K02018, L25815,
L25816, L25817, L37329, L37330, L37331, M11205, M18647, M18648, M18649, M18650,
M18651, M27970, M38309, M38335, NC_002018, U42630, U42631, U42632, U42633, U42634,
U42635, U42636, U42637, U42770, U42771, U42772, U42773, U42774, U42775, U42776,
U42777, U42778, U42779, U42780, U43417, U43418, U43419, U43420, U43421, U43422,
U43423, U43424, U43425, U43426, U43427, U51245, US1246, U51247, U53166, U71140,
U71141, U71142, U71143, X15281, Y14193, Y14194
7: GenBank and LANL accession numbers for MP sequences (segment 7) used in this
analysis.
AB036778, AB126629, AB126637, AB212057, AB262466, AF036358, AF038271, AF038272,
AF038273, AF038274, AF046090, AF084282, AF084284, AF115286, AF231358, AF231359,
AF255363, AF255364, AF255365, AF255366, AF255367, AF255368, AF255369, AF255370,
AF255371, AF255372, AF255373, AF255374, AF258522, AF258523, AF342818, AF348188,
AF348189, AF348190, AF348191, AF348192, AF348193, AF348194, AF348195, AF348196,
AF348197, AF348912, AF348913, AF386765, AF386766, AF386767, AF386768, AF386769,
AF386770, AF386771, AF386772, AF389121, AF398876, AF401293, AJ278646, AJ278647,
AJ278648, AJ293925, AJ298947, AJ298948, AJ458305, AJ458306, AJ458307, AJ458308,
AJ458339, AY043025, AY130766, AY210026, AY210027, AY210028, AY210029, AY210030,
AY210031, AY210032, AY210033, AY210034, AY210035, AY210036, AY210037, AY210038,
AY210039, AY210040, AY210041, AY210042, AY210043, AY210044, AY210045, AY210046,
AY210047, AY210048, AY210049, AY210050, AY210051, AY210052, AY210053, AY210054,
AY210055, AY210056, AY210057, AY210058, AY210059, AY210060, AY210061, AY210062,
AY210063, AY210064, AY210065, AY210239, AY210240, AY210241, AY210242, AY210243,
AY210244, AY210245, AY210246, AY210247, AY210248, AY210249, AY210250, AY210251,
AY210252, AY210253, AY210254, AY210255, AY210256, AY210257, AY210258, AY210259,
AY210260, AY210261, AY210262, AY210263, AY210264, AY210265, AY210266, AY210267,
AY210268, AY210269, AY210270, AY575893, AY575894, AY651387, AY651388, AY651389,
AY651390, AY818144, AY947475, CY000002, CY000010, CY000018, CY000026, CY000034,
CY000042, CY000050, CY000058, CY000066, CY000074, CY000082, CY000090, CY000098,
CY000106, CY000114, CY000122, CY000130, CY000138, CY000146, CY000154, CY000162,
CY000170, CY000178, CY000186, CY000194, CY000202, CY000210, CY000218, CY000226,
CY000234, CY000242, CY000250, CY000258, CY000266, CY000274, CY000282, CY000290,
CY000298, CY000306, CY000314, CY000322, CY000330, CY000338, CY000346, CY000354,
CY000362, CY000370, CY000378, CY000386, CY000394, CY000402, CY000410, CY000418,
CY000426, CY000434, CY000442, CY000450, CY000458, CY000466, CY000474, CY000482,
CY000490, CY000498, CY000506, CY000514, CY000522, CY000530, CY000538, CY000546,
CY000554, CY000562, CY000570, CY000577, CY000586, CY000594, CY000602, CY000610,
CY000618, CY000626, CY000634, CY000642, CY000650, CY000658, CY000666, CY000674,
CY000682, CY000690, CY000698, CY000706, CY000714, CY000722, CY000730, CY000738,
CY000746, CY000754, CY000762, CY000770, CY000778, CY000786, CY000794, CY000802,
CY000810, CY000818, CY000826, CY000834, CY000842, CY000850, CY000858, CY000866,
CY000874, CY000882, CY000890, CY000902, CY000910, CY000918, CY000926, CY000934,
CY000942, CY000950, CY000958, CY000966, CY000974, CY000982, CY000990, CY000998,
CY001006, CY001014, CY001022, CY001030, CY001038, CY001046, CY001054, CY001062,
CY001065, CY001073, CY001081, CY001089, CY001097, CY001105, CY001113, CY001121,
CY001129, CY001137, CY001145, CY001153, CY001161, CY001169, CY001177, CY001185,
CY001198, CY001206, CY001214, CY001222, CY001230, CY001238, CY001246, CY001254,
CY001262, CY001270, CY001278, CY001286, CY001294, CY001302, CY001310, CY001318,
CY001326, CY001334, CY001342, CY001350, CY001358, CY001366, CY001374, CY001382,
CY001398, CY001406, CY001414, CY001422, CY001430, CY001438, CY001446, CY001454,
CY001462, CY001470, CY001478, CY001486, CY001494, CY001505, CY001513, CY001521,
CY001529, CY001537, CY001545, CY001553, CY001561, CY001569, CY001577, CY001585,
CY001593, CY001601, CY001609, CY001617, CY001625, CY001633, CY001641, CY001649,
CY001657, CY001665, CY001673, CY001681, CY001689, CY001697, CY001705, CY001713,
CY001721, CY001729, CY001737, CY001745, CY001753, CY001761, CY001769, CY001777,
CY001785, CY001793, CY001801, CY001809, CY001817, CY001825, CY001833, CY001841,
CY001849, CY001857, CY001865, CY001873, CY001881, CY001889, CY001897, CY001905,
CY001913, CY001921, CY001929, CY001937, CY001945, CY001953, CY001961, CY001969,
CY001977, CY001985, CY001993, CY002001, CY002009, CY002017, CY002025, CY002033,
CY002041, CY002049, CY002057, CY002065, CY002073, CY002081, CY002089, CY002097,
CY002105, CY002113, CY002121, CY002129, CY002137, CY002145, CY002153, CY002161,
CY002169, CY002177, CY002185, CY002193, CY002201, CY002209, CY002217, CY002225,
CY002233, CY002241, CY002249, CY002257, CY002265, CY002273, CY002281, CY002289,
CY002297, CY002305, CY002313, CY002329, CY002337, CY002345, CY002353, CY002361,
CY002369, CY002377, CY002385, CY002393, CY002401, CY002409, CY002417, CY002425,
CY002433, CY002441, CY002449, CY002457, CY002465, CY002473, CY002481, CY002489,
CY002497, CY002505, CY002513, CY002521, CY002529, CY002537, CY002545, CY002553,
CY002561, CY002569, CY002577, CY002585, CY002593, CY002601, CY002609, CY002617,
CY002625, CY002633, CY002641, CY002649, CY002657, CY002665, CY002673, CY002681,
CY002689, CY002697, CY002705, CY002713, CY002721, CY002729, CY002737, CY002745,
CY002753, CY002761, CY002769, CY002777, CY002785, CY002793, CY002801, CY002809,
CY002817, CY002907, CY002915, CY002923, CY002931, CY002939, CY002947, CY002955,
CY002963, CY002970, CY002977, CY002985, CY002993, CY003001, CY003009, CY003017,
CY003025, CY003033, CY003041, CY003049, CY003057, CY003065, CY003073, CY003081,
CY003089, CY003097, CY003105, CY003113, CY003121, CY003127, CY003137, CY003145,
CY003153, CY003161, CY003169, CY003177, CY003185, CY003193, CY003201, CY003209,
CY003217, CY003225, CY003233, CY003241, CY003249, CY003257, CY003265, CY003273,
CY003281, CY003289, CY003297, CY003305, CY003313, CY003321, CY003329, CY003337,
CY003345, CY003353, CY003369, CY003377, CY003385, CY003393, CY003401, CY003409,
CY003417, CY003425, CY003433, CY003441, CY003449, CY003457, CY003465, CY003473,
CY003481, CY003489, CY003497, CY003505, CY003513, CY003521, CY003529, CY003537,
CY003545, CY003553, CY003561, CY003569, CY003577, CY003585, CY003593, CY003601,
CY003609, CY003617, CY003625, CY003633, CY003641, CY003649, CY003657, CY003665,
CY003673, CY003681, CY003689, CY003697, CY003705, CY003713, CY003721, CY003729,
CY003737, CY003745, CY003753, CY003762, CY003770, CY003778, CY003786, CY003794,
CY003802, CY003810, CY003818, CY003826, CY003834, CY006045, CY006053, CY006061,
CY006069, CY006077, CY006085, CY006093, CY006100, CY006108, CY006116, CY006124,
CY006132, CY006140, CY006148, CY006156, CY006164, CY006172, CY006180, CY006188,
CY006196, CY006204, CY006212, CY006220, CY006228, CY006236, CY006244, CY006252,
CY006260, CY006268, CY006276, CY006284, CY006292, CY006300, CY006308, CY006316,
CY006324, CY006332, CY006340, CY006348, CY006356, CY006364, CY006372, CY006380,
CY006388, CY006396, CY006404, CY006412, CY006420, CY006428, CY006436, CY006444,
CY006452, CY006460, CY006468, CY006476, CY006484, CY006492, CY006500, CY006508,
CY006516, CY006524, CY006532, CY006540, CY006548, CY006556, CY006564, CY006572,
CY006580, CY006588, CY006596, CY006604, CY006612, CY006620, CY006628, CY006636,
CY006660, CY006668, CY006676, CY006684, CY006692, CY006700, CY006708, CY006716,
CY006724, CY006732, CY006740, CY006748, CY006756, CY006764, CY006772, CY006780,
CY006788, CY006796, CY006804, CY006812, CY006820, CY006828, CY006836, CY006844,
CY006852, CY006860, CY006868, CY006876, CY006884, CY006892, CY006900, CY006908,
CY006916, CY006924, CY006932, CY006940, CY006948, CY006956, CY006964, CY006972,
CY006980, CY006988, CY006996, CY007004, CY007012, CY007020, CY007028, CY007036,
CY007044, CY007052, CY007060, CY007068, CY007076, CY007084, CY007092, CY007100,
CY007108, CY007116, CY007124, CY007132, CY007140, CY007148, CY007156, CY007164,
CY007172, CY007180, CY007188, CY007196, CY007204, CY007212, CY007220, CY007228,
CY007236, CY007244, CY007252, CY007260, CY007268, CY007276, CY007284, CY007292,
CY007300, CY007308, CY007316, CY007324, CY007332, CY007340, CY007348, CY007356,
CY007364, CY007372, CY007380, CY007388, CY007396, CY007404, CY007412, CY007420,
CY007428, CY007436, CY007444, CY007452, CY007460, CY007468, CY007476, CY007484,
CY007492, CY007500, CY007508, CY007516, CY007524, CY007532, CY007540, CY007548,
CY007556, CY007564, CY007572, CY007580, CY007588, CY007596, CY007604, CY007612,
CY007620, CY007628, CY007636, CY007644, CY007652, CY007660, CY007668, CY007676,
CY007684, CY007692, CY007700, CY007708, CY007716, CY007724, CY007732, CY007740,
CY007748, CY007756, CY007764, CY007772, CY007780, CY007788, CY007796, CY007804,
CY007812, CY007820, CY007828, CY007836, CY007844, CY007852, CY007860, CY007868,
CY007876, CY007884, CY007892, CY007900, CY007908, CY007916, CY007924, CY007932,
CY007940, CY007948, CY007956, CY007964, CY007972, CY007980, CY007988, CY007996,
CY008004, CY008012, CY008020, CY008028, CY008036, CY008044, CY008052, CY008060,
CY008068, CY008076, CY008084, CY008092, CY008100, CY008108, CY008116, CY008124,
CY008132, CY008140, CY008149, CY008157, CY008165, CY008173, CY008181, CY008189,
CY008197, CY008205, CY008213, CY008221, CY008229, CY008237, CY008245, CY008253,
CY008261, CY008269, CY008277, CY008285, CY008293, CY008301, CY008309, CY008317,
CY008325, CY008333, CY008341, CY008349, CY008357, CY008365, CY008373, CY008381,
CY008389, CY008397, CY008405, CY008413, CY008421, CY008429, CY008437, CY008445,
CY008453, CY008461, CY008469, CY008477, CY008485, CY008493, CY008501, CY008509,
CY008517, CY008525, CY008533, CY008541, CY008549, CY008557, CY008565, CY008573,
CY008581, CY008589, CY008597, CY008605, CY008613, CY008621, CY008629, CY008637,
CY008645, CY008653, CY008661, CY008669, CY008677, CY008685, CY008693, CY008701,
CY008709, CY008717, CY008725, CY008733, CY008741, CY008749, CY008757, CY008765,
CY008773, CY008781, CY008789, CY008797, CY008805, CY008813, CY008821, CY008829,
CY008837, CY008845, CY008853, CY008861, CY008869, CY008877, CY008885, CY008893,
CY008901, CY008909, CY008917, CY008925, CY008933, CY008941, CY008949, CY008957,
CY008965, CY008973, CY008981, CY008989, CY008997, CY009005, CY009013, CY009021,
CY009029, CY009037, CY009045, CY009053, CY009061, CY009069, CY009077, CY009085,
CY009093, CY009101, CY009109, CY009117, CY009125, CY009133, CY009141, CY009149,
CY009157, CY009165, CY009173, CY009181, CY009189, CY009197, CY009205, CY009213,
CY009221, CY009229, CY009237, CY009245, CY009253, CY009261, CY009269, CY009277,
CY009285, CY009293, CY009317, CY009325, CY009333, CY009341, CY009349, CY009357,
CY009365, CY009389, CY009397, CY009405, CY009413, CY009421, CY009429, CY009437,
CY009445, CY009453, CY009461, CY009469, CY009477, CY009485, CY009493, CY009501,
CY009509, CY009517, CY009525, CY009533, CY009541, CY009549, CY009557, CY009565,
CY009573, CY009581, CY009589, CY009597, CY009605, CY009613, CY009621, CY009637,
CY009645, CY009653, CY009661, CY009669, CY009677, CY009685, CY009693, CY009701,
CY009709, CY009717, CY009725, CY009733, CY009741, CY009749, CY009757, CY009765,
CY009773, CY009781, CY009789, CY009797, CY009805, CY009813, CY009821, CY009829,
CY009837, CY009845, CY009853, CY009861, CY009869, CY009877, CY009885, CY009901,
CY009909, CY009925, CY009933, CY009941, CY009949, CY009957, CY009965, CY009973,
CY009981, CY009989, CY009997, CY010005, CY010013, CY010021, CY010029, CY010037,
CY010045, CY010053, CY010061, CY010069, CY010077, CY010085, CY010093, CY010101,
CY010109, CY010117, CY010125, CY010133, CY010141, CY010149, CY010157, CY010165,
CY010173, CY010181, CY010189, CY010197, CY010205, CY010213, CY010221, CY010229,
CY010237, CY010245, CY010253, CY010261, CY010269, CY010277, CY010285, CY010293,
CY010301, CY010309, CY010317, CY010325, CY010333, CY010341, CY010349, CY010357,
CY010365, CY010373, CY010381, CY010389, CY010397, CY010405, CY010413, CY010421,
CY010429, CY010437, CY010445, CY010453, CY010461, CY010469, CY010477, CY010485,
CY010493, CY010501, CY010509, CY010517, CY010525, CY010533, CY010541, CY010549,
CY010557, CY010589, CY010597, CY010605, CY010613, CY010621, CY010629, CY010637,
CY010645, CY010653, CY010661, CY010669, CY010677, CY010685, CY010693, CY010701,
CY010709, CY010717, CY010725, CY010733, CY010741, CY010749, CY010757, CY010765,
CY010773, CY010781, CY010789, CY010797, CY010805, CY010813, CY010821, CY010829,
CY010837, CY010845, CY010853, CY010861, CY010869, CY010877, CY010885, CY010893,
CY010901, CY010909, CY010917, CY010925, CY010933, CY010941, CY010949, CY010957,
CY010965, CY010973, CY010981, CY010989, CY010997, CY011005, CY011013, CY011021,
CY011065, CY011073, CY011081, CY011089, CY011121, CY011129, CY011137, CY011145,
CY011153, CY011161, CY011169, CY011177, CY011185, CY011193, CY011201, CY011209,
CY011217, CY011225, CY011233, CY011241, CY011257, CY011265, CY011273, CY011281,
CY011289, CY011297, CY011305, CY011313, CY011321, CY011329, CY011337, CY011345,
CY011353, CY011361, CY011369, CY011377, CY011385, CY011393, CY011401, CY011409,
CY011417, CY011425, CY011433, CY011441, CY011449, CY011457, CY011465, CY011473,
CY011481, CY011489, CY011497, CY011505, CY011513, CY011521, CY011529, CY011537,
CY011545, CY011553, CY011561, CY011569, CY011577, CY011585, CY011593, CY011601,
CY011609, CY011617, CY011625, CY011633, CY011641, CY011649, CY011657, CY011665,
CY011673, CY011681, CY011689, CY011697, CY011705, CY011713, CY011721, CY011729,
CY011737, CY011745, CY011753, CY011761, CY011769, CY011777, CY011785, CY011793,
CY011801, CY011809, CY011817, CY011825, CY011833, CY011841, CY011849, CY011857,
CY011865, CY011873, CY011881, CY011889, CY011897, CY011905, CY011913, CY011921,
CY011929, CY011937, CY011945, CY011953, CY011961, CY011969, CY011977, CY011985,
CY011993, CY012001, CY012009, CY012017, CY012025, CY012033, CY012041, CY012049,
CY012057, CY012065, CY012073, CY012081, CY012089, CY012097, CY012105, CY012113,
CY012121, CY012129, CY012137, CY012145, CY012153, CY012161, CY012169, CY012177,
CY012185, CY012193, CY012201, CY012209, CY012217, CY012225, CY012233, CY012241,
CY012249, CY012257, CY012265, CY012273, CY012281, CY012289, CY012297, CY012305,
CY012313, CY012321, CY012329, CY012337, CY012345, CY012353, CY012361, CY012369,
CY012377, CY012385, CY012393, CY012401, CY012409, CY012417, CY012425, CY012433,
CY012441, CY012449, CY012457, CY012465, CY012473, CY012481, CY012489, CY012497,
CY012505, CY012513, CY012521, CY012529, CY012537, CY012545, CY012553, CY012561,
CY012569, CY012577, CY012585, CY012593, CY012601, CY012609, CY012617, CY012625,
CY012633, CY012641, CY012649, CY012657, CY012665, CY012673, CY012681, CY012689,
CY012697, CY012705, CY012713, CY012721, CY012729, CY012737, CY012745, CY012753,
CY012761, CY012769, CY012777, CY012785, CY012793, CY012849, CY012857, CY012865,
CY012873, CY012881, CY012889, CY012897, CY012905, CY012913, CY012921, CY012929,
CY012937, CY012945, CY012953, CY012961, CY012969, CY012977, CY012985, CY012993,
CY013001, CY013009, CY013017, CY013025, CY013033, CY013041, CY013049, CY013057,
CY013065, CY013073, CY013081, CY013089, CY013097, CY013105, CY013113, CY013121,
CY013129, CY013137, CY013145, CY013153, CY013161, CY013169, CY013177, CY013185,
CY013193, CY013201, CY013209, CY013217, CY013225, CY013233, CY013241, CY013272,
CY013280, CY013288, CY013296, CY013304, CY013312, CY013320, CY013328, CY013336,
CY013344, CY013352, CY013360, CY013368, CY013376, CY013384, CY013390, CY013398,
CY013406, CY013414, CY013422, CY013430, CY013438, CY013446, CY013454, CY013462,
CY013470, CY013478, CY013486, CY013494, CY013502, CY013510, CY013518, CY013526,
CY013534, CY013542, CY013550, CY013558, CY013566, CY013574, CY013582, CY013590,
CY013598, CY013606, CY013614, CY013622, CY013630, CY013638, CY013646, CY013654,
CY013662, CY013670, CY013678, CY013686, CY013694, CY013702, CY013710, CY013718,
CY013726, CY013734, CY013742, CY013750, CY013758, CY013766, CY013774, CY013782,
CY013790, CY013798, CY013806, CY013814, CY013822, CY013830, CY013838, CY013846,
CY013854, CY013872, CY013880, CY013888, CY013896, CY013904, CY013912, CY013920,
CY013928, CY013936, CY013944, CY013952, CY013960, CY013968, CY013976, CY013984,
CY013992, CY014000, CY014008, CY014016, CY014024, CY014032, CY014040, CY014048,
CY014056, CY014064, CY014072, CY014080, CY014088, CY014096, CY014104, CY014112,
CY014120, CY014128, CY014136, CY014144, CY014152, CY014160, CY014173, CY014180,
CY014214, CY014215, CY014216, CY014217, CY014218, CY014219, CY014220, CY014222,
CY014223, CY014224, CY014225, CY014226, CY014275, CY014283, CY014291, CY014299,
CY014306, CY014314, CY014369, CY014377, CY014385, CY014397, CY014405, CY014413,
CY014421, CY014429, CY014437, CY014445, CY014453, CY014461, CY014469, CY014478,
CY014485, CY014493, CY014501, CY014506, CY014514, CY014532, CY014540, CY014546,
CY014977, CY015007, CY015509, CY015517, CY015525, CY015533, CY015541, CY015549,
CY015557, CY015565, CY015573, CY015581, CY015589, CY015597, CY015605, CY015613,
CY015621, CY015629, CY015637, CY015645, CY015653, CY015661, CY015669, CY015677,
CY015685, CY015693, CY015701, CY015709, CY015717, CY015725, CY015733, CY015741,
CY015749, CY015757, CY015765, CY015773, CY015781, CY015789, CY015797, CY015805,
CY015813, CY015821, CY015829, CY015837, CY015845, CY015853, CY015861, CY015869,
CY015877, CY015885, CY015893, CY015901, CY015909, CY015917, CY015925, CY015933,
CY015941, CY015949, CY015957, CY015965, CY015973, CY015981, CY015989, CY015997,
CY016005, CY016013, CY016021, CY016029, CY016037, CY016045, CY016053, CY016061,
CY016069, CY016077, CY016085, CY016093, CY016101, CY016109, CY016117, CY016197,
CY016205, CY016213, CY016229, CY016237, CY016245, CY016253, CY016261, CY016269,
CY016404, CY016428, CY016436, CY016444, CY016452, CY016460, CY016468, CY016476,
CY016484, CY016492, CY016500, CY016508, CY016516, CY016524, CY016532, CY016540,
CY016548, CY016556, CY016564, CY016572, CY016580, CY016588, CY016596, CY016604,
CY016628, CY016636, CY016644, CY016652, CY016660, CY016668, CY016676, CY016684,
CY016692, CY016700, CY016708, CY016716, CY016724, CY016732, CY016740, CY016748,
CY016756, CY016764, CY016772, CY016964, CY016972, CY016980, CY016988, CY016996,
CY017004, CY017012, CY017020, CY017084, CY017092, CY017100, CY017108, CY017116,
CY017124, CY017132, CY017140, CY017148, CY017156, CY017164, CY017172, CY017196,
CY017204, CY017212, CY017220, CY017228, CY017236, CY017244, CY017252, CY017260,
CY017268, CY017284, CY017292, CY017300, CY017308, CY017316, CY017324, CY017332,
CY017340, CY017348, CY017356, CY017364, CY017372, CY017380, CY017388, CY017396,
CY017420, CY017428, CY017436, CY017444, CY017452, CY017460, CY017468, CY017476,
CY017484, CY017492, CY017500, CY017508, CY017516, CY017524, CY017532, CY017540,
CY017548, CY017556, CY017564, CY017572, CY017580, CY017588, CY017596, CY017604,
CY017612, CY017620, CY017628, CY017641, CY017649, CY017657, CY017665, CY017673,
CY017681, CY017691, DQ094266, DQ094267, DQ094271, DQ094272, DQ094273, DQ094274,
DQ094275, DQ098266, DQ098267, DQ098269, DQ100422, DQ100423, DQ100424, DQ226095,
DQ249265, DQ249266, DQ249267, DQ249268, DQ299489, DQ360841, DQ372592, DQ415349,
DQ415350, DQ415351, DQ415352, DQ415353, DQ415354, DQ415355, DQ415356, DQ415357,
DQ415358, DQ415359, DQ469961, DQ487329, DQ487338, DQ492980, DQ492981, DQ492982,
DQ492983, DQ492984, DQ492985, DQ492986, DQ492987, DQ492989, DQ492990, DQ508828,
DQ508836, DQ508844, DQ508852, DQ508860, DQ508868, DQ508876, DQ508884, DQ508892,
DQ508900, DQ508908, DQ508932, DQ535725, DQ643814, DQ849002, DQ849003, DQ849004,
DQ849005, DQ849006, DQ849007, DQ849008, DQ849009, DQ849010, DQ849011, DQ849012,
DQ849013, DQ849014, DQ849015, DQ849016, DQ849017, DQ849018, DQ849019, DQ849020,
DQ849021, DQ849022, DQ849023, DQ849024, DQ986133, EF101742, EF101750,
ISDN111182, ISDN111183, ISDN111184, ISDN111185, ISDN125785, ISDN125876,
ISDN128028, ISDN129534, ISDN129585, ISDN130366, ISDN130374, ISDN132407,
ISDN132415, ISDN133183, ISDN133318, ISDN133325, ISDN133357, ISDN133365,
ISDN133372, ISDN13425, ISDN136480, ISDN136842, ISDN136850, ISDN137446,
ISDN137449, ISDN137450, ISDN137451, ISDN137452, ISDN137453, ISDN137454,
ISDN137455, ISDN137456, ISDN137457, ISDN137458, ISDN137459, ISDN137460,
ISDN138749, ISDN138765, ISDN138773, ISDN139827, ISDN139828, ISDN140087,
ISDN140088, ISDN140089, ISDN140090, ISDN140091, ISDN140092, ISDN140811,
ISDN140819, ISDN140838, ISDN140846, ISDN140854, ISDN140862, ISDN140869,
ISDN140897, ISDN140898, ISDN140899, ISDN140927, ISDN141892, ISDN141893,
ISDN181368, ISDN183298, ISDN183306, ISDN183314, ISDN183702, ISDN183710,
ISDN183718, ISDN183726, ISDN183734, ISDN183742, ISDN183750, ISDN183758,
ISDN183766, ISDN183774, ISDN183783, ISDN185499, ISDN186572, ISDN186573,
ISDN186574, ISDN186575, ISDN186586, ISDN186589, ISDN186590, ISDN187422,
ISDN187430, ISDN187438, ISDN187446, ISDN187454, ISDN204137, ISDN204145,
ISDN204153, ISDN207099, ISDN207107, ISDN209856, ISDN39957, ISDN39958, ISDN45755,
J02167, K01140, L18995, L18999, L25814, L25818, M19374, M23920, M23978, M54941,
M63515, M63516, M63521, M63531, M81570, M81576, M81582, NC_002016, U02084,
U02463, U08863, U53168, U53169, U65561, U65562, U65563, U65564, U65565, U65566,
U65567, U65568, U65569, U65570, U65571, U65572, U65573, U65574, U65575, U65576,
U65577, U65578, X08088, X08089, X08090, X08091, X08092, X08093, X53029, X59240
8: GenBank and LANL accession numbers for NS sequences (segment 8) used in this
analysis.
AB036777, AB126628, AB126636, AB212058, AB212059, AB262467, AF036360, AF038275,
AF038276, AF038277, AF038278, AF038279, AF046091, AF055422, AF055423, AF055424,
AF055425, AF084285, AF084286, AF084287, AF115288, AF256177, AF256178, AF256179,
AF256180, AF256181, AF256182, AF256183, AF256184, AF256185, AF256186, AF256187,
AF256188, AF258521, AF333238, AF342817, AF348198, AF348199, AF348200, AF348201,
AF348202, AF348203, AF348204, AF348205, AF348206, AF389122, AF398877, AJ238022,
AJ278649, AJ293941, AJ298949, AJ298950, AJ404735, AJ404736, AY043027, AY210151,
AY210152, AY210153, AY210154, AY210155, AY210156, AY210157, AY210158, AY210159,
AY210160, AY210161, AY210162, AY210163, AY210164, AY210165, AY210166, AY210167,
AY210168, AY210169, AY210170, AY210171, AY210172, AY210173, AY210174, AY210175,
AY210176, AY210177, AY210178, AY210179, AY210180, AY210181, AY210182, AY210183,
AY210184, AY210185, AY210186, AY210187, AY210188, AY210189, AY210190, AY210191,
AY210192, AY210285, AY210286, AY210287, AY210288, AY210289, AY210290, AY210291,
AY210292, AY210293, AY210294, AY210295, AY210296, AY210297, AY210298, AY210299,
AY210300, AY210301, AY210302, AY210303, AY210304, AY210305, AY210306, AY210307,
AY210308, AY210309, AY210310, AY210311, AY210312, AY210313, AY210314, AY210315,
AY210316, AY526747, AY576368, AY576369, AY651552, AY651553, AY651554, AY651555,
AY818147, CY000005, CY000013, CY000021, CY000029, CY000037, CY000045, CY000053,
CY000061, CY000069, CY000077, CY000085, CY000093, CY000101, CY000109, CY000117,
CY000125, CY000133, CY000141, CY000149, CY000157, CY000165, CY000173, CY000181,
CY000189, CY000197, CY000205, CY000213, CY000221, CY000229, CY000237, CY000245,
CY000253, CY000261, CY000269, CY000277, CY000285, CY000293, CY000301, CY000309,
CY000317, CY000325, CY000333, CY000341, CY000349, CY000357, CY000365, CY000373,
CY000381, CY000389, CY000397, CY000405, CY000413, CY000421, CY000429, CY000437,
CY000445, CY000453, CY000461, CY000469, CY000477, CY000485, CY000493, CY000501,
CY000509, CY000516, CY000525, CY000533, CY000541, CY000549, CY000557, CY000565,
CY000573, CY000580, CY000589, CY000597, CY000605, CY000613, CY000621, CY000629,
CY000637, CY000645, CY000653, CY000661, CY000669, CY000677, CY000685, CY000693,
CY000701, CY000709, CY000717, CY000725, CY000733, CY000741, CY000749, CY000757,
CY000765, CY000773, CY000781, CY000789, CY000797, CY000805, CY000813, CY000821,
CY000829, CY000837, CY000845, CY000853, CY000861, CY000869, CY000877, CY000885,
CY000893, CY000905, CY000913, CY000921, CY000929, CY000937, CY000945, CY000953,
CY000961, CY000969, CY000977, CY000985, CY000993, CY001001, CY001009, CY001017,
CY001025, CY001033, CY001041, CY001049, CY001057, CY001068, CY001076, CY001084,
CY001092, CY001100, CY001108, CY001116, CY001124, CY001132, CY001140, CY001148,
CY001156, CY001164, CY001172, CY001180, CY001188, CY001193, CY001201, CY001209,
CY001217, CY001225, CY001233, CY001241, CY001249, CY001257, CY001265, CY001273,
CY001281, CY001289, CY001297, CY001305, CY001313, CY001321, CY001329, CY001337,
CY001345, CY001353, CY001361, CY001369, CY001377, CY001385, CY001401, CY001409,
CY001417, CY001425, CY001433, CY001441, CY001449, CY001457, CY001465, CY001473,
CY001481, CY001489, CY001497, CY001508, CY001516, CY001524, CY001532, CY001540,
CY001548, CY001556, CY001564, CY001572, CY001580, CY001588, CY001596, CY001604,
CY001612, CY001620, CY001628, CY001636, CY001644, CY001652, CY001660, CY001668,
CY001676, CY001684, CY001692, CY001700, CY001708, CY001716, CY001724, CY001732,
CY001740, CY001748, CY001756, CY001764, CY001772, CY001780, CY001788, CY001796,
CY001804, CY001812, CY001820, CY001828, CY001836, CY001844, CY001852, CY001860,
CY001868, CY001876, CY001884, CY001892, CY001900, CY001908, CY001916, CY001924,
CY001932, CY001940, CY001948, CY001956, CY001964, CY001972, CY001980, CY001988,
CY001996, CY002004, CY002012, CY002020, CY002028, CY002036, CY002044, CY002052,
CY002060, CY002068, CY002076, CY002084, CY002092, CY002100, CY002108, CY002116,
CY002124, CY002132, CY002140, CY002148, CY002156, CY002164, CY002172, CY002180,
CY002188, CY002196, CY002204, CY002212, CY002220, CY002228, CY002236, CY002244,
CY002252, CY002260, CY002268, CY002276, CY002284, CY002292, CY002300, CY002308,
CY002316, CY002332, CY002340, CY002348, CY002356, CY002364, CY002372, CY002380,
CY002388, CY002396, CY002404, CY002412, CY002420, CY002428, CY002436, CY002444,
CY002452, CY002460, CY002468, CY002476, CY002484, CY002492, CY002500, CY002508,
CY002516, CY002524, CY002532, CY002540, CY002548, CY002556, CY002564, CY002572,
CY002580, CY002588, CY002596, CY002604, CY002612, CY002620, CY002628, CY002636,
CY002644, CY002652, CY002660, CY002668, CY002676, CY002684, CY002692, CY002700,
CY002708, CY002716, CY002724, CY002732, CY002740, CY002748, CY002756, CY002764,
CY002772, CY002780, CY002788, CY002796, CY002804, CY002812, CY002820, CY002910,
CY002918, CY002926, CY002934, CY002942, CY002950, CY002958, CY002966, CY002973,
CY002980, CY002988, CY002996, CY003004, CY003012, CY003020, CY003028, CY003036,
CY003044, CY003052, CY003060, CY003068, CY003076, CY003084, CY003092, CY003100,
CY003108, CY003116, CY003125, CY003131, CY003140, CY003148, CY003156, CY003164,
CY003172, CY003180, CY003188, CY003196, CY003204, CY003212, CY003220, CY003228,
CY003236, CY003244, CY003252, CY003260, CY003268, CY003276, CY003284, CY003292,
CY003300, CY003308, CY003316, CY003324, CY003332, CY003340, CY003348, CY003356,
CY003372, CY003380, CY003388, CY003396, CY003404, CY003412, CY003420, CY003428,
CY003436, CY003444, CY003452, CY003460, CY003468, CY003476, CY003484, CY003492,
CY003500, CY003508, CY003516, CY003524, CY003532, CY003540, CY003548, CY003556,
CY003564, CY003572, CY003580, CY003588, CY003596, CY003604, CY003612, CY003620,
CY003628, CY003636, CY003644, CY003652, CY003660, CY003668, CY003676, CY003684,
CY003692, CY003700, CY003708, CY003716, CY003724, CY003732, CY003740, CY003748,
CY003756, CY003765, CY003773, CY003781, CY003789, CY003797, CY003805, CY003813,
CY003821, CY003829, CY003837, CY006048, CY006056, CY006064, CY006072, CY006080,
CY006088, CY006096, CY006103, CY006111, CY006119, CY006127, CY006135, CY006143,
CY006151, CY006159, CY006167, CY006175, CY006183, CY006191, CY006199, CY006207,
CY006215, CY006223, CY006231, CY006239, CY006247, CY006255, CY006263, CY006271,
CY006279, CY006287, CY006295, CY006303, CY006311, CY006319, CY006327, CY006335,
CY006343, CY006351, CY006359, CY006367, CY006375, CY006383, CY006391, CY006399,
CY006407, CY006415, CY006423, CY006431, CY006439, CY006447, CY006455, CY006463,
CY006471, CY006479, CY006487, CY006495, CY006503, CY006511, CY006519, CY006527,
CY006535, CY006543, CY006551, CY006559, CY006567, CY006575, CY006583, CY006591,
CY006599, CY006607, CY006615, CY006623, CY006631, CY006639, CY006663, CY006671,
CY006679, CY006687, CY006695, CY006703, CY006711, CY006719, CY006727, CY006735,
CY006743, CY006751, CY006759, CY006767, CY006775, CY006783, CY006791, CY006799,
CY006807, CY006815, CY006823, CY006831, CY006839, CY006847, CY006855, CY006863,
CY006871, CY006879, CY006887, CY006895, CY006903, CY006911, CY006919, CY006927,
CY006935, CY006943, CY006951, CY006959, CY006967, CY006975, CY006983, CY006991,
CY006999, CY007007, CY007015, CY007023, CY007031, CY007039, CY007047, CY007055,
CY007063, CY007071, CY007079, CY007087, CY007095, CY007103, CY007111, CY007119,
CY007127, CY007135, CY007143, CY007151, CY007159, CY007167, CY007175, CY007183,
CY007191, CY007199, CY007207, CY007215, CY007223, CY007231, CY007239, CY007247,
CY007255, CY007263, CY007271, CY007279, CY007287, CY007295, CY007303, CY007311,
CY007319, CY007327, CY007335, CY007343, CY007351, CY007359, CY007367, CY007375,
CY007383, CY007391, CY007399, CY007407, CY007415, CY007423, CY007431, CY007439,
CY007447, CY007455, CY007463, CY007471, CY007479, CY007487, CY007495, CY007503,
CY007511, CY007519, CY007527, CY007535, CY007543, CY007551, CY007559, CY007567,
CY007575, CY007583, CY007591, CY007599, CY007607, CY007615, CY007623, CY007631,
CY007639, CY007647, CY007655, CY007663, CY007671, CY007679, CY007687, CY007695,
CY007703, CY007711, CY007719, CY007727, CY007735, CY007743, CY007751, CY007759,
CY007767, CY007775, CY007783, CY007791, CY007799, CY007807, CY007815, CY007823,
CY007831, CY007839, CY007847, CY007855, CY007863, CY007871, CY007879, CY007887,
CY007895, CY007903, CY007911, CY007919, CY007927, CY007935, CY007943, CY007951,
CY007959, CY007967, CY007975, CY007983, CY007991, CY007999, CY008007, CY008015,
CY008023, CY008031, CY008039, CY008047, CY008055, CY008063, CY008071, CY008079,
CY008087, CY008095, CY008103, CY008111, CY008119, CY008127, CY008135, CY008143,
CY008152, CY008160, CY008168, CY008176, CY008184, CY008192, CY008200, CY008208,
CY008216, CY008224, CY008232, CY008240, CY008248, CY008256, CY008264, CY008272,
CY008280, CY008288, CY008296, CY008304, CY008312, CY008320, CY008328, CY008336,
CY008344, CY008352, CY008360, CY008368, CY008376, CY008384, CY008392, CY008400,
CY008408, CY008416, CY008424, CY008432, CY008440, CY008448, CY008456, CY008464,
CY008472, CY008480, CY008488, CY008496, CY008504, CY008512, CY008520, CY008528,
CY008536, CY008544, CY008552, CY008560, CY008568, CY008576, CY008584, CY008592,
CY008600, CY008608, CY008616, CY008624, CY008632, CY008640, CY008648, CY008656,
CY008664, CY008672, CY008680, CY008688, CY008696, CY008704, CY008712, CY008720,
CY008728, CY008736, CY008744, CY008752, CY008760, CY008768, CY008776, CY008784,
CY008792, CY008800, CY008808, CY008816, CY008824, CY008832, CY008840, CY008848,
CY008856, CY008864, CY008872, CY008880, CY008888, CY008896, CY008904, CY008912,
CY008920, CY008928, CY008936, CY008944, CY008952, CY008960, CY008968, CY008976,
CY008984, CY008992, CY009000, CY009008, CY009016, CY009024, CY009032, CY009040,
CY009048, CY009056, CY009064, CY009072, CY009080, CY009088, CY009096, CY009104,
CY009112, CY009120, CY009128, CY009136, CY009144, CY009152, CY009160, CY009168,
CY009176, CY009184, CY009192, CY009200, CY009208, CY009216, CY009224, CY009232,
CY009240, CY009248, CY009256, CY009264, CY009272, CY009280, CY009288, CY009296,
CY009320, CY009328, CY009336, CY009344, CY009352, CY009360, CY009368, CY009392,
CY009400, CY009408, CY009416, CY009424, CY009432, CY009440, CY009448, CY009456,
CY009464, CY009472, CY009480, CY009488, CY009496, CY009504, CY009512, CY009520,
CY009528, CY009536, CY009544, CY009552, CY009560, CY009568, CY009576, CY009584,
CY009592, CY009600, CY009608, CY009616, CY009624, CY009640, CY009648, CY009656,
CY009664, CY009672, CY009680, CY009688, CY009696, CY009704, CY009712, CY009720,
CY009728, CY009736, CY009744, CY009752, CY009760, CY009768, CY009776, CY009784,
CY009792, CY009800, CY009808, CY009816, CY009824, CY009832, CY009840, CY009848,
CY009856, CY009864, CY009872, CY009880, CY009888, CY009904, CY009912, CY009928,
CY009936, CY009944, CY009952, CY009960, CY009968, CY009976, CY009984, CY009992,
CY010000, CY010008, CY010016, CY010024, CY010032, CY010040, CY010048, CY010056,
CY010064, CY010072, CY010080, CY010088, CY010096, CY010104, CY010112, CY010120,
CY010128, CY010136, CY010144, CY010152, CY010160, CY010168, CY010176, CY010184,
CY010192, CY010200, CY010208, CY010216, CY010224, CY010232, CY010240, CY010248,
CY010256, CY010264, CY010272, CY010280, CY010288, CY010296, CY010304, CY010312,
CY010320, CY010328, CY010336, CY010344, CY010352, CY010360, CY010368, CY010376,
CY010384, CY010392, CY010400, CY010408, CY010416, CY010424, CY010432, CY010440,
CY010448, CY010456, CY010464, CY010472, CY010480, CY010488, CY010496, CY010504,
CY010512, CY010520, CY010528, CY010536, CY010544, CY010552, CY010560, CY010592,
CY010600, CY010608, CY010616, CY010624, CY010632, CY010640, CY010648, CY010656,
CY010664, CY010672, CY010680, CY010688, CY010696, CY010704, CY010712, CY010720,
CY010728, CY010736, CY010744, CY010752, CY010760, CY010768, CY010776, CY010784,
CY010792, CY010800, CY010808, CY010816, CY010824, CY010832, CY010840, CY010848,
CY010856, CY010864, CY010872, CY010880, CY010888, CY010896, CY010904, CY010912,
CY010920, CY010928, CY010936, CY010944, CY010952, CY010960, CY010968, CY010976,
CY010984, CY010992, CY011000, CY011008, CY011016, CY011024, CY011068, CY011076,
CY011084, CY011092, CY011124, CY011132, CY011140, CY011148, CY011156, CY011164,
CY011172, CY011180, CY011188, CY011196, CY011204, CY011212, CY011220, CY011228,
CY011236, CY011244, CY011260, CY011268, CY011276, CY011284, CY011292, CY011300,
CY011308, CY011316, CY011324, CY011332, CY011340, CY011348, CY011356, CY011364,
CY011372, CY011380, CY011388, CY011396, CY011404, CY011412, CY011420, CY011428,
CY011436, CY011444, CY011452, CY011460, CY011468, CY011476, CY011484, CY011492,
CY011500, CY011508, CY011516, CY011524, CY011532, CY011540, CY011548, CY011556,
CY011564, CY011572, CY011580, CY011588, CY011596, CY011604, CY011612, CY011620,
CY011628, CY011636, CY011644, CY011652, CY011660, CY011668, CY011676, CY011684,
CY011692, CY011700, CY011708, CY011716, CY011724, CY011732, CY011740, CY011748,
CY011756, CY011764, CY011772, CY011780, CY011788, CY011796, CY011804, CY011812,
CY011820, CY011828, CY011836, CY011844, CY011852, CY011860, CY011868, CY011876,
CY011884, CY011892, CY011900, CY011908, CY011916, CY011924, CY011932, CY011940,
CY011948, CY011956, CY011964, CY011972, CY011980, CY011988, CY011996, CY012004,
CY012012, CY012020, CY012028, CY012036, CY012044, CY012052, CY012060, CY012068,
CY012076, CY012084, CY012092, CY012100, CY012108, CY012116, CY012124, CY012132,
CY012140, CY012148, CY012156, CY012164, CY012172, CY012180, CY012188, CY012196,
CY012204, CY012212, CY012220, CY012228, CY012236, CY012244, CY012252, CY012260,
CY012268, CY012276, CY012284, CY012292, CY012300, CY012308, CY012316, CY012324,
CY012332, CY012340, CY012348, CY012356, CY012364, CY012372, CY012380, CY012388,
CY012396, CY012404, CY012412, CY012420, CY012428, CY012436, CY012444, CY012452,
CY012460, CY012468, CY012476, CY012484, CY012492, CY012500, CY012508, CY012516,
CY012524, CY012532, CY012540, CY012548, CY012556, CY012564, CY012572, CY012580,
CY012588, CY012596, CY012604, CY012612, CY012620, CY012628, CY012636, CY012644,
CY012652, CY012660, CY012668, CY012676, CY012684, CY012692, CY012700, CY012708,
CY012716, CY012724, CY012732, CY012740, CY012748, CY012756, CY012764, CY012772,
CY012780, CY012788, CY012796, CY012852, CY012860, CY012868, CY012876, CY012884,
CY012892, CY012900, CY012908, CY012916, CY012924, CY012932, CY012940, CY012948,
CY012956, CY012964, CY012972, CY012980, CY012988, CY012996, CY013004, CY013012,
CY013020, CY013028, CY013036, CY013044, CY013052, CY013060, CY013068, CY013076,
CY013084, CY013092, CY013100, CY013108, CY013116, CY013124, CY013132, CY013140,
CY013148, CY013156, CY013164, CY013172, CY013180, CY013188, CY013196, CY013204,
CY013212, CY013220, CY013228, CY013236, CY013244, CY013275, CY013283, CY013291,
CY013299, CY013307, CY013315, CY013323, CY013331, CY013339, CY013347, CY013355,
CY013363, CY013371, CY013379, CY013387, CY013393, CY013401, CY013409, CY013417,
CY013425, CY013433, CY013441, CY013449, CY013457, CY013465, CY013473, CY013481,
CY013489, CY013497, CY013505, CY013513, CY013521, CY013529, CY013537, CY013545,
CY013553, CY013561, CY013569, CY013577, CY013585, CY013593, CY013601, CY013609,
CY013617, CY013625, CY013633, CY013641, CY013649, CY013657, CY013665, CY013673,
CY013681, CY013689, CY013697, CY013705, CY013713, CY013721, CY013729, CY013737,
CY013745, CY013753, CY013761, CY013769, CY013777, CY013785, CY013793, CY013801,
CY013809, CY013817, CY013825, CY013833, CY013841, CY013849, CY013857, CY013875,
CY013883, CY013891, CY013899, CY013907, CY013915, CY013923, CY013931, CY013939,
CY013947, CY013955, CY013963, CY013971, CY013979, CY013987, CY013995, CY014003,
CY014011, CY014019, CY014027, CY014035, CY014043, CY014051, CY014059, CY014067,
CY014075, CY014083, CY014091, CY014099, CY014107, CY014115, CY014123, CY014131,
CY014139, CY014147, CY014155, CY014163, CY014174, CY014181, CY014255, CY014256,
CY014257, CY014258, CY014259, CY014261, CY014262, CY014263, CY014264, CY014265,
CY014266, CY014267, CY014268, CY014276, CY014284, CY014292, CY014300, CY014307,
CY014315, CY014372, CY014380, CY014388, CY014400, CY014408, CY014416, CY014424,
CY014432, CY014440, CY014448, CY014456, CY014464, CY014472, CY014473, CY014488,
CY014496, CY014504, CY014509, CY014517, CY014533, CY014541, CY014547, CY014980,
CY015010, CY015512, CY015520, CY015528, CY015536, CY015544, CY015552, CY015560,
CY015568, CY015576, CY015584, CY015592, CY015600, CY015608, CY015616, CY015624,
CY015632, CY015640, CY015648, CY015656, CY015664, CY015672, CY015680, CY015688,
CY015696, CY015704, CY015712, CY015720, CY015728, CY015736, CY015744, CY015752,
CY015760, CY015768, CY015776, CY015784, CY015792, CY015800, CY015808, CY015816,
CY015824, CY015832, CY015840, CY015848, CY015856, CY015864, CY015872, CY015880,
CY015888, CY015896, CY015904, CY015912, CY015920, CY015928, CY015936, CY015944,
CY015952, CY015960, CY015968, CY015976, CY015984, CY015992, CY016000, CY016008,
CY016016, CY016024, CY016032, CY016040, CY016048, CY016056, CY016064, CY016072,
CY016080, CY016088, CY016096, CY016104, CY016112, CY016120, CY016200, CY016208,
CY016216, CY016232, CY016240, CY016248, CY016256, CY016264, CY016272, CY016407,
CY016431, CY016439, CY016447, CY016455, CY016463, CY016471, CY016479, CY016487,
CY016495, CY016503, CY016511, CY016519, CY016527, CY016535, CY016543, CY016551,
CY016559, CY016567, CY016575, CY016583, CY016591, CY016599, CY016607, CY016631,
CY016639, CY016647, CY016655, CY016663, CY016671, CY016679, CY016687, CY016695,
CY016703, CY016711, CY016719, CY016727, CY016735, CY016743, CY016751, CY016759,
CY016767, CY016775, CY016967, CY016975, CY016983, CY016991, CY016999, CY017007,
CY017015, CY017023, CY017087, CY017095, CY017103, CY017111, CY017119, CY017127,
CY017135, CY017143, CY017151, CY017159, CY017167, CY017175, CY017199, CY017207,
CY017215, CY017223, CY017231, CY017239, CY017247, CY017255, CY017263, CY017271,
CY017287, CY017295, CY017303, CY017311, CY017319, CY017327, CY017335, CY017343,
CY017351, CY017359, CY017367, CY017375, CY017383, CY017391, CY017399, CY017423,
CY017431, CY017439, CY017447, CY017455, CY017463, CY017471, CY017479, CY017487,
CY017495, CY017503, CY017511, CY017519, CY017527, CY017535, CY017543, CY017551,
CY017559, CY017567, CY017575, CY017583, CY017591, CY017599, CY017607, CY017615,
CY017623, CY017631, CY017642, CY017650, CY017658, CY017666, CY017674, CY017682,
CY017692, D10571, D30667, D30674, D30676, DQ096580, DQ098261, DQ098262, DQ098263,
DQ098264, DQ098265, DQ226117, DQ249269, DQ249270, DQ360842, DQ372595, DQ415360,
DQ415361, DQ415362, DQ415363, DQ415364, DQ415365, DQ415366, DQ415367, DQ415368,
DQ415369, DQ415370, DQ469958, DQ487332, DQ487336, DQ493244, DQ493245, DQ493246,
DQ493247, DQ493248, DQ493249, DQ493250, DQ493251, DQ493252, DQ493253, DQ493254,
DQ508829, DQ508837, DQ508845, DQ508853, DQ508861, DQ508869, DQ508877, DQ508885,
DQ508893, DQ508901, DQ508909, DQ508933, DQ535728, DQ643813, EF101744, EF101751,
ISDN125787, ISDN125877, ISDN128030, ISDN129535, ISDN129586, ISDN130369,
ISDN130377, ISDN132410, ISDN132418, ISDN133100, ISDN133320, ISDN13426,
ISDN136845, ISDN136853, ISDN137828, ISDN137829, ISDN137830, ISDN137831,
ISDN137832, ISDN137833, ISDN137834, ISDN137835, ISDN137836, ISDN137837,
ISDN137838, ISDN137839, ISDN137840, ISDN137841, ISDN138752, ISDN138768,
ISDN138776, ISDN140094, ISDN140096, ISDN140097, ISDN140098, ISDN140099,
ISDN140100, ISDN140101, ISDN140102, ISDN140814, ISDN140822, ISDN140839,
ISDN140847, ISDN140855, ISDN140863, ISDN140870, ISDN140906, ISDN140907,
ISDN140908, ISDN181369, ISDN183301, ISDN183309, ISDN183317, ISDN183705,
ISDN183713, ISDN183721, ISDN183729, ISDN183737, ISDN183745, ISDN183753,
ISDN183761, ISDN183769, ISDN183777, ISDN183778, ISDN185501, ISDN187433,
ISDN187441, ISDN187449, ISDN187457, ISDN188323, ISDN188325, ISDN188326,
ISDN188327, ISDN188329, ISDN188330, ISDN188331, ISDN188333, ISDN188334,
ISDN188335, ISDN188336, ISDN188337, ISDN188338, ISDN188341, ISDN188342,
ISDN188345, ISDN188346, ISDN188347, ISDN188348, ISDN188349, ISDN188351,
ISDN204140, ISDN204148, ISDN204156, ISDN207102, ISDN207110, ISDN40016,
ISDN40017, ISDN40040, ISDN41028, K00576, K00577, K00578, K01332, L25720, M12590,
M12592, M12593, M12594, M12595, M12596, M12597, M17699, M23968, M34829, M35094,
M57640, M57641, M57642, M57643, M80974, M80975, M81572, M81578, M81584,
NC_002020, U02087, U08862, U13682, U13683, U53170, U53171, U65670, U65671, U65672,
U65673, U65674, V01102, V01104, X15282, X52146, Z21498

[0122] Highly conserved 19-mer and 25-mer sequence fragments were identified by extracting all 19-mer and 25-mer sequence fragments from each of the influenza A viral sequences under study, and then tabulating whether or not each sequence fragment was present as an exact match within each of the influenza A viral sequences. Thus, a first viral sequence contains a 19-mer and 25-mer sequence fragment that extends from position 1 through 19, another from position 2 through 20, another from position 3 through 21, etc. Likewise the second, third, and fourth viral sequences were extracted in the same way, all the way down to the last viral sequence in the list (Table 1). The sequence fragments were then added to a growing table of sequence fragments and a count was maintained of the number of influenza A viral sequences that contain each 19-mer and 25-mer fragment. Finally, the fragment frequency was expressed as the percent of influenza A viral sequences that contained each specific 19-mer and 25-mer fragment relative to all sequences examined. Table 2 lists the most conserved 19-mer sequence fragments, down to 70%, and their frequency of occurrence. Table 3 lists the most conserved 25-mer sequence fragments, also down to 70%, and their frequency of occurrence.

[0123] Table 2 and the entire contents of the text file named “Table 2.txt,” created Mar. 8, 2007, size about 77 KB, which was filed electronically with this specification are hereby incorporated by reference.

[0124] The sequences in Table 2-1 are numbered SEQ ID NOS: 1-464, respectively in order of appearance.

[0125] The sequences in Table 2-2 are numbered SEQ ID NOS: 465-844, respectively in order of appearance.

[0126] The sequences in Table 2-3 are numbered SEQ ID NOS: 845-1278, respectively in order of appearance.

[0127] The sequences in Table 2-4 are numbered SEQ ID NOS: 1279-1282, respectively in order of appearance.

[0128] The sequences in Table 2-5 are numbered SEQ ID NOS: 1283-1550, respectively in order of appearance.

[0129] The sequences in Table 2-6 are numbered SEQ ID NOS: 1551-1693, respectively in order of appearance.

[0130] The sequences in Table 2-7 are numbered SEQ ID NOS: 1694-2091, respectively in order of appearance.

[0131] The sequences in Table 2-8 are numbered SEQ ID NOS: 2092-2314, respectively in order of appearance.

[0132] Table 3 and the entire contents of the text file named “Table 3.txt,” created Mar. 8, 2007, size about 51 KB, which was filed electronically with this specification are hereby incorporated by reference.

[0133] The sequences in Table 3-1 are numbered SEQ ID NOS: 2315-2568, respectively in order of appearance.

[0134] The sequences in Table 3-2 are numbered SEQ ID NOS: 2569-2781, respectively in order of appearance.

[0135] The sequences in Table 3-3 are numbered SEQ ID NOS: 2782-3011, respectively in order of appearance.

[0136] The sequences in Table 3-5 are numbered SEQ ID NOS: 3012-3130, respectively in order of appearance.

[0137] The sequences in Table 3-6 are numbered SEQ ID NOS: 3131-3184, respectively in order of appearance.

[0138] The sequences in Table 3-7 are numbered SEQ ID NOS: 3185-3452, respectively in order of appearance.

[0139] The sequences in Table 3-8 are numbered SEQ ID NOS: 3453-3584, respectively in order of appearance.

[0140] In Table 4, some of the highly conserved sequences from Table 2 are shown along with their close variants. The close variants were obtained from the same influenza viral sequences of Table 1. The close variants of the highly conserved sequences from Table 2 were obtained by using the highly conserved 19-mer sequences in Table 2 as reference sequences. For each 19-mer reference sequence in Table 2, a target fragment or fragments (variant or variants) were sought in each of the influenza A viral sequences described in Table 1 that most closely matched the 19-mer reference sequence. The most closely matching target fragments were those having the fewest number of nucleotide differences from the reference sequence.

[0141] If two target fragments had the same number of nucleotide differences from the reference sequence, then preference was given to the target fragment that can form more GU wobble base pairs between the sense strand of the target fragment and the antisense strand of the reference sequence.

[0142] The highly conserved reference sequences in Table 2 which were used to obtain the variants had an identical sequence match to a sequence in at least 85% of the influenza A viral sequences described in Table 1. The variants contained 3 (three) or fewer nucleotide differences (changes) from the reference sequence.

[0143] Table 4 and the entire contents of the text file named “Table 4.txt,” created Mar. 8, 2007, size 268 KB, which was filed electronically with this specification are hereby incorporated by reference.

[0144] The sequences in Table 4-1 are numbered SEQ ID NOS: 3585-4631, respectively in order of appearance.

[0145] The sequences in Table 4-2 are numbered SEQ ID NOS: 4632-4639, respectively in order of appearance.

[0146] The sequences in Table 4-3 are numbered SEQ ID NOS: 4640-6312, respectively in order of appearance.

[0147] The sequences in Table 4-5 are numbered SEQ ID NOS: 6313-6981, respectively in order of appearance.

[0148] The sequences in Table 4-7 are numbered SEQ ID NOS: 6982-8614, respectively in order of appearance.

[0149] The sequences in Table 4-8 are numbered SEQ ID NOS: 8615-10151, respectively in order of appearance.

[0150] Table 5 shows sequence variants for the highly conserved 25-mer sequences from Table 3. This analysis was performed as described for Table 4, above, with the following changes. First, the conserved reference sequences were chosen to match at least 80% of the influenza viral sequences of Table 1, rather than 85%. Second, the variants were chosen to contain 3 (three) or fewer nucleotide differences (changes) from the reference sequence in the left (5′) 19 nucleotides of the 25-mer sequence, rather than restricting it to 3 or fewer mismatches in the entire 25 nucleotide sequence. These changes were made because the 25-mer dicer sequence is cleaved by the enzyme dicer to leave a 19-mer duplex at the 5′ end of the coding strand. Thus, mismatches in the remaining 6 (six) nucleotides of the dicer sequence are not expected to significantly affect the activity of the siRNA.

[0151] A small number of sequences in Tables 4 and 5 contain the letter N (or n). The N indicates that any of the four nucleotides are possible at that position. These variants are obtained directly from the submitted GenBank and ISD sequences. The N may represent an uncertainty in determining the correct nucleotide at the time of sequence analysis, or it may indicate that a mixed population of nucleotides was observed at that position.

[0152] Table 5 and the entire contents of the text file named “Table 5.txt,” created Mar. 8, 2007, size 324 KB, which was filed electronically with this specification are hereby incorporated by reference.

[0153] The sequences in Table 5-1 are numbered SEQ ID NOS: 10152-11244, respectively in order of appearance.

[0154] The sequences in Table 5-2 are numbered SEQ ID NOS: 11245-11393, respectively in order of appearance.

[0155] The sequences in Table 5-3 are numbered SEQ ID NOS: 11394-13235, respectively in order of appearance.

[0156] The sequences in Table 5-5 are numbered SEQ ID NOS: 13236-13824, respectively in order of appearance.

[0157] The sequences in Table 5-7 are numbered SEQ ID NOS: 13825-15393, respectively in order of appearance.

[0158] The sequences in Table 5-8 are numbered SEQ ID NOS: 15394-16949, respectively in order of appearance.

### EXAMPLE 2

### Synthesized siRNAs

[0159] Table 6 and 7 lists the influenza siRNAs (DX) that were synthesized. Table 6 lists the sequences of the sense strands, while Table 7 lists the corresponding sequences of the antisense strands, in order of appearance.

[0160] The sequences listed in Table 6 are numbered SEQ ID NOS: 16950-17007, respectively in order of appearance.

TABLE 6

Sense strands of influenza siRNAs

| | | |
|---|---|---|
| Compound | Sense Sequence | No. |

| | | |
|---|---|---|
| DX2844 | Cy5;rG;rG;rA;rU;rC;rU;rU;rA;rU;rU;rU;rC;rU;rU;rC;rG;rG;rA;rG;dT;dT | 16950 |
| DX3003 | Cy5;rG;rG;rA;rU;rC;rU;rU;rA;rU;rU;rU;rC;rU;rU;rC;rG;rG;rA;rG;dT;dT | 16951 |
| DX2852 | rA;rG;rA;rC;rA;rG;rC;rG;rA;rC;rC;rA;rA;rA;rA;rG;rA;rA;rU;rU;rC;rG;rG;dA;dT | 16952 |
| DX3044 | rA;rG;rA;rC;rA;rG;rC;rG;rA;rC;rC;rA;rA;rA;rA;rG;rA;rA;rU;rU;rC;rG;rG;dA;dT | 16953 |
| DX2855 | rA;rU;rG;rA;rA;rG;rA;rU;rC;rU;rG;rU;rU;rC;rC;rA;rC;rC;rA;rU;rU;rG;rA;dA;dG | 16954 |
| DX3046 | rA;rU;rG;rA;rA;rG;rA;rU;rC;rU;rG;rU;rU;rC;rC;rA;rC;rC;rA;rU;rU;rG;rA;dA;dG | 16955 |
| DX2858 | rG;rA;rU;rC;rU;rG;rU;rU;rC;rC;rA;rC;rC;rA;rU;rU;rG;rA;rA;rG;rA;rA;rC;dT;dC | 16956 |
| DX3048 | rG;rA;rU;rC;rU;rG;rU;rU;rC;rC;rA;rC;rC;rA;rU;rU;rG;rA;rA;rG;rA;rA;rC;dT;dC | 16957 |
| DX2861 | rU;rU;rG;rA;rG;rG;rA;rG;rU;rG;rC;rC;rU;rG;rA;rU;rU;rA;rA;rU;rG;rA;rU;dC;dC | 16958 |
| DX3050 | rU;rU;rG;rA;rG;rG;rA;rG;rU;rG;rC;rC;rU;rG;rA;rU;rU;rA;rA;rU;rG;rA;rU;dC;dC | 16959 |
| DX2871 | rG;rG;rC;rU;rC;rU;rU;rA;rU;rU;rU;rC;rU;rU;rC;rG;rG;rA;rG;dT;dT | 16960 |
| DX2874 | rG;rG;rA;rU;rC;rC;rU;rA;rU;rU;rU;rC;rU;rU;rC;rG;rG;rA;rG;dT;dT | 16961 |
| DX2877 | rG;rG;rA;rU;rC;rU;rU;rA;rC;rU;rU;rC;rU;rU;rC;rG;rG;rA;rG;dT;dT | 16962 |
| DX2744 | rG;rG;rA;rU;rC;rU;rU;rA;rU;rU;rU;rC;rU;rU;rC;rG;rG;rA;rG;dT;dT | 16963 |
| DX2880 | rG;rG;rA;rU;rC;rU;rU;rA;rU;rU;rU;rC;rU;rU;rC;rG;rG;rA;rG;dT;dT | 16964 |
| DX2882 | rG;rG;rA;rU;rC;rU;rU;rA;rU;rU;rU;rC;rU;rU;rC;rG;rG;rA;rG;dT;dT | 16965 |
| DX2889 | rG;rG;rA;rU;rC;rU;rU;rA;rU;rU;rU;rC;rU;rU;rC;rG;rG;rA;rG;dT;dT | 16966 |
| DX2890 | rG;rG;rA;rU;rC;rU;rU;rA;rU;rU;rU;rC;rU;rU;rC;rG;rG;rA;rG;dT;dT | 16967 |
| DX2891 | rG;rG;rA;rU;rC;rU;rU;rA;rU;rU;rU;rC;rU;rU;rC;rG;rG;rA;rG;dT;dT | 16968 |
| DX2892 | rG;rG;rA;rU;rC;rU;rU;rA;rU;rU;rU;rC;rU;rU;rC;rG;rG;rA;rG;dT;dT | 16969 |
| DX2888 | rG;rG;rA;rU;rC;rU;rU;rA;rU;rU;rU;rC;rU;rU;rC;rG;rG;rC;rG;dT;dT | 16970 |
| DX2895 | rG;rA;rU;rC;rU;rU;rA;rU;rU;rU;rC;rU;rU;rC;rG;rG;rA;rG;rA;dT;dT | 16971 |
| DX2906 | rG;rA;rU;rC;rU;rU;rA;rU;rU;rU;rC;rU;rU;rC;rG;rG;rA;rG;rA;dT;dT | 16972 |
| DX2908 | rG;rA;rU;rC;rU;rU;rA;rU;rU;rU;rC;rU;rU;rC;rG;rG;rA;rG;rA;dT;dT | 16973 |
| DX2912 | rG;rA;rU;rC;rU;rU;rA;rU;rU;rU;rC;rU;rU;rC;rG;rG;rA;rG;rA;dT;dT | 16974 |
| DX2913 | rG;rA;rU;rC;rU;rU;rA;rU;rU;rU;rC;rU;rU;rC;rG;rG;rA;rG;rA;dT;dT | 16975 |
| DX2914 | rG;rA;rU;rC;rU;rU;rA;rU;rU;rU;rC;rU;rU;rC;rG;rG;rA;rG;rA;dT;dT | 16976 |
| DX2915 | rG;rA;rU;rC;rU;rU;rA;rU;rU;rU;rC;rU;rU;rC;rG;rG;rA;rG;rA;dT;dT | 16977 |
| DX2898 | rG;rC;rU;rC;rU;rU;rA;rU;rU;rU;rC;rU;rU;rC;rG;rG;rA;rG;rA;dT;dT | 16978 |
| DX2901 | rG;rA;rU;rC;rC;rU;rA;rU;rU;rU;rC;rU;rU;rC;rG;rG;rA;rG;rA;dT;dT | 16979 |
| DX2904 | rG;rA;rU;rC;rU;rU;rA;rC;rU;rU;rC;rU;rU;rC;rG;rG;rA;rG;rA;dT;dT | 16980 |
| DX2911 | rG;rA;rU;rC;rU;rU;rA;rU;rU;rU;rC;rU;rU;rC;rG;rG;rC;rG;rA;dT;dT | 16981 |
| DX3054 | rG;rA;rU;rC;rU;rU;rA;rU;rU;rU;rC;rU;rU;rC;rG;rG;rA;rG;rA;rC;rA;rA;dT;dG | 16982 |
| DX3056 | rA;rU;rC;rU;rU;rA;rU;rU;rU;rC;rU;rU;rC;rG;rG;rA;rG;rA;rC;rA;rA;dT;dG | 16983 |
| DX2956 | rG;rG;rA;rU;rC;rU;rU;rA;rU;rU;rU;rC;rU;rU;rC;rG;rG;rA;rG;rA;rC;rA;rA;dT;dG | 16984 |
| DX3030 | rG;rG;rA;rU;rC;rU;rU;rA;rU;rU;rU;rC;rU;rU;rC;rG;rG;rA;rG;rA;rC;rA;rA;dT;dG | 16985 |
| DX3052 | rG;rG;rA;rU;rC;rU;rU;rA;rU;rU;rU;rC;rU;rU;rC;rG;rG;rA;rG;rA;rC;rA;rA;dT;dG | 16986 |
| DX3058 | rG;rG;rA;rU;rC;rU;rU;rA;rU;rU;rU;rC;rU;rU;rC;rG;rG;rA;rG;rA;rC;rA;rA;dT;dG | 16987 |
| DX3060 | rG;rG;rA;rU;rC;rU;rU;rA;rU;rU;rU;rC;rU;rU;rC;rG;rG;rA;rG;rA;rC;rA;rA;dT;dG | 16988 |
| DX3161 | rG;rG;rA;rU;rC;rU;rU;rA;rU;rU;rU;rC;rU;rU;rC;rG;rG;rA;rG;rA;rC;rA;rA;dT;dG | 16989 |
| DX2819 | rG;rA;rU;rC;rU;rG;rU;rU;rC;rC;rA;rC;rC;rA;rU;rU;rG;rA;rA;dT;dT | 16990 |
| DX2820 | rA;rU;rG;rA;rA;rG;rA;rU;rC;rU;rG;rU;rU;rC;rC;rA;rC;rC;rA;dT;dT | 16991 |
| DX2821 | rG;rC;rA;rA;rU;rU;rG;rA;rG;rG;rA;rG;rU;rG;rC;rC;rU;rG;rA;dT;dT | 16992 |
| DX2822 | rU;rU;rG;rA;rG;rG;rA;rG;rU;rG;rC;rC;rU;rG;rA;rU;rU;rA;rA;dT;dT | 16993 |
| DX2823 | rC;rG;rG;rG;rA;rC;rU;rC;rU;rA;rG;rC;rA;rU;rA;rC;rU;rU;rA;dT;dT | 16994 |
| DX2824 | rA;rC;rU;rG;rA;rC;rA;rG;rC;rC;rA;rG;rA;rC;rA;rG;rC;rG;rA;dT;dT | 16995 |
| DX2825 | rA;rG;rA;rC;rA;rG;rC;rG;rA;rC;rC;rA;rA;rA;rA;rG;rA;rA;rU;dT;dT | 16996 |
| DX2962 | rG;rG;rA;rT;rC;rT;rT;rA;rT;rT;rT;rC;rT;rT;rC;rG;rG;rA;rG;dT;dT | 16997 |
| DX3078 | Cy5;rG;rG;rA;rU;rC;rU;rU;rA;rU;rU;rU;rC;rU;rU;rC;rG;rG;rA;rG;rA;rC;rA;rA;dT;dG | 16998 |
| DX3151 | rG;rG;rA;rU;rC;rU;rU;rA;rU;rU;rU;rC;rU;rU;rC;rG;rG;rA;rG;rA;rC;rA;rA;rT;dG | 16999 |
| DX3154 | rG;rG;rA;rU;rC;rU;rU;rA;rU;rU;rU;rC;rU;rU;rC;rG;rG;rA;rG;rA;rC;rA;rA;rT;rT | 17000 |
| DX3156 | rG;rG;rA;rT;rC;rT;rT;rA;rT;rT;rT;rC;rT;rT;rC;rG;rG;rA;rG;rA;rC;rA;rA;rT;dG | 17001 |
| DX3159 | rG;omeG;omeA;rU;rC;rU;rU;rA;rU;rU;rU;rC;rU;rU;rC;rG;rG;rA;rG;rA;rC;rA;rA;dT;dG | 17002 |
| DX3160 | rG;omeG;omeA;rU;rC;rU;rU;rA;rU;rU;rU;rC;rU;rU;rC;rG;rG;rA;rG;rA;rC;rA;rA;dT;dG | 17003 |
| DX3163 | rG;rG;rA;rU;rC;rU;rU;rA;rU;rU;rU;rC;rU;rU;rC;rG;rG;rA;rG;rA;rC;rA;rA;omeU;omeG | 17004 |
| DX3165 | rG;rG;rA;rU;rC;rU;rU;rA;rU;rU;rU;rC;rU;rU;rC;rG;rG;rA;rG;rA;rC;omeA;omeA;dT;dG | 17005 |
| DX3029 | rG;rG;rA;rT;rC;rT;rT;rA;rT;rT;rT;rC;rT;rT;rC;rG;rG;rA;rG;rA;rC;rA;rA;dT;dG | 17006 |
| DX3076 | rG;rG;rA;rT;rC;rT;rT;rA;rT;rT;rT;rC;rT;rT;rC;rG;rG;rA;rG;rA;rC;rA;rA;dT;dG | 17007 |

[0161] The sequences listed in Table 7 are numbered SEQ ID NOS: 17008-17065, respectively in order of appearance.

TABLE 7

Antisense strands of influenza siRNAs

| | |
|---|---|
| Antisense sequence | No. |

| | |
|---|---|
| p;rC;rU;rC;rC;rG;rA;rA;rG;rA;rA;rA;rU;rA;rA;rG;rA;rC;rC;rU;dT;dT | 17008 |
| rC;rU;rC;rC;rG;rA;rA;rG;rA;rA;rA;rU;rA;rA;rG;rA;rU;rC;rC;dT;dT | 17009 |
| rA;rU;rC;rC;rG;rA;rA;rU;rU;rC;rU;rU;rU;rU;rG;rG;rU;rC;rG;rC;rU;rG;rU;rC;rU;dT;dT | 17010 |
| rA;rU;rC;rC;rG;rA;rA;rU;rU;rC;rU;rU;rU;rU;rG;rG;rU;rC;rG;rC;rU;rG;rU;rC;rU;rU;rU | 17011 |
| rC;rU;rU;rC;rA;rA;rU;rG;rG;rU;rG;rG;rA;rA;rC;rA;rG;rA;rU;rC;rU;rU;rC;rA;rU;dT;dT | 17012 |
| rC;rU;rU;rC;rA;rA;rU;rG;rG;rU;rG;rG;rA;rA;rC;rA;rG;rA;rU;rC;rU;rU;rC;rA;rU;rU;rU | 17013 |
| rG;rA;rG;rU;rU;rC;rU;rU;rC;rA;rA;rU;rG;rG;rU;rG;rG;rA;rA;rC;rA;rG;rA;rU;rC;dT;dT | 17014 |
| rG;rA;rG;rU;rU;rC;rU;rU;rC;rA;rA;rU;rG;rG;rU;rG;rG;rA;rA;rC;rA;rG;rA;rU;rC;rU;rU | 17015 |
| rG;rG;rA;rU;rC;rA;rU;rU;rA;rA;rU;rC;rA;rG;rG;rC;rA;rC;rU;rC;rC;rU;rC;rA;rA;dT;dT | 17016 |
| rG;rG;rA;rU;rC;rA;rU;rU;rA;rA;rU;rC;rA;rG;rG;rC;rA;rC;rU;rC;rC;rU;rC;rA;rA;rU;rU | 17017 |
| rC;rU;rC;rC;rG;rA;rA;rG;rA;rA;rA;rU;rA;rA;rG;rA;rI;rC;rC;dT;dT | 17018 |
| rC;rU;rC;rC;rG;rA;rA;rG;rA;rA;rA;rU;rA;rI;rG;rA;rU;rC;rC;dT;dT | 17019 |
| rC;rU;rC;rC;rG;rA;rA;rG;rA;rA;rI;rU;rA;rA;rG;rA;rU;rC;rC;dT;dT | 17020 |
| rC;rU;rC;rC;rG;rA;rA;rG;rA;rA;rA;rU;rA;rA;rG;rA;rU;rC;rC;dT;dT | 17021 |
| rC;rU;rC;rC;rG;rA;rA;rI;rA;rA;rA;rU;rA;rA;rG;rA;rU;rC;rC;dT;dT | 17022 |
| rC;rU;rC;rC;rI;rA;rA;rG;rA;rA;rA;rU;rA;rA;rG;rA;rU;rC;rC;dT;dT | 17023 |
| rC;rU;rC;rC;rG;rA;rA;rG;rA;rA;rA;rU;rA;rA;rG;rA;rI;rC;rC;dT;dT | 17024 |
| rC;rU;rC;rC;rG;rA;rA;rG;rA;rA;rA;rU;rA;rI;rG;rA;rU;rC;rC;dT;dT | 17025 |
| rC;rU;rC;rC;rG;rA;rA;rG;rA;rA;rI;rU;rA;rA;rG;rA;rU;rC;rC;dT;dT | 17026 |
| rC;rI;rC;rC;rG;rA;rA;rG;rA;rA;rA;rU;rA;rA;rG;rA;rU;rC;rC;dT;dT | 17027 |
| rC;rI;rC;rC;rG;rA;rA;rG;rA;rA;rA;rU;rA;rA;rG;rA;rU;rC;rC;dT;dT | 17028 |
| rU;rC;rU;rC;rC;rG;rA;rA;rG;rA;rA;rA;rU;rA;rA;rG;rA;rU;rC;dT;dT | 17029 |
| rU;rC;rU;rC;rC;rG;rA;rA;rI;rA;rA;rA;rU;rA;rA;rG;rA;rU;rC;dT;dT | 17030 |
| rU;rC;rU;rC;rC;rI;rA;rA;rG;rA;rA;rA;rU;rA;rA;rG;rA;rU;rC;dT;dT | 17031 |
| rU;rC;rU;rC;rC;rG;rA;rA;rG;rA;rA;rA;rU;rA;rA;rG;rA;rI;rC;dT;dT | 17032 |
| rU;rC;rU;rC;rC;rG;rA;rA;rG;rA;rA;rA;rU;rA;rI;rG;rA;rU;rC;dT;dT | 17033 |
| rU;rC;rU;rC;rC;rG;rA;rA;rG;rA;rA;rI;rU;rA;rA;rG;rA;rU;rC;dT;dT | 17034 |
| rU;rC;rI;rC;rC;rG;rA;rA;rG;rA;rA;rA;rU;rA;rA;rG;rA;rU;rC;dT;dT | 17035 |
| rU;rC;rU;rC;rC;rG;rA;rA;rG;rA;rA;rA;rU;rA;rA;rG;rA;rI;rC;dT;dT | 17036 |
| rU;rC;rU;rC;rC;rG;rA;rA;rG;rA;rA;rA;rU;rA;rI;rG;rA;rU;rC;dT;dT | 17037 |
| rU;rC;rU;rC;rC;rG;rA;rA;rG;rA;rA;rI;rU;rA;rA;rG;rA;rU;rC;dT;dT | 17038 |
| rU;rC;rI;rC;rC;rG;rA;rA;rG;rA;rA;rA;rU;rA;rA;rG;rA;rU;rC;dT;dT | 17039 |
| rC;rA;rU;rU;rG;rU;rC;rU;rC;rC;rG;rA;rA;rG;rA;rA;rA;rU;rA;rA;rG;rA;rU;rC;rC;rU;rU | 17040 |
| rC;rA;rU;rU;rG;rU;rC;rU;rC;rC;rG;rA;rA;rG;rA;rA;rA;rU;rA;rA;rG;rA;rU;rC;rC;rU;rU | 17041 |
| rC;rA;rU;rU;rG;rU;rC;rU;rC;rC;rG;rA;rA;rG;rA;rA;rA;rU;rA;rA;rG;rA;rU;rC;rC;dT;dT | 17042 |
| rC;rA;rU;rU;rG;rU;rC;rU;rC;rC;rG;rA;rA;rG;rA;rA;rA;rU;rA;rA;rG;rA;rU;rC;rC;rU;rU | 17043 |
| rC;rA;rU;rU;rG;rU;rC;rU;rC;rC;rG;rA;rA;rG;rA;rA;rA;rU;rA;rA;rG;rA;rU;rC;rC;rT;rT | 17044 |
| rA;rU;rU;rG;rU;rC;rU;rC;rC;rG;rA;rA;rG;rA;rA;rA;rU;rA;rA;rG;rA;rU;rC;rC;rU;rU | 17045 |
| rU;rU;rG;rU;rC;rU;rC;rC;rG;rA;rA;rG;rA;rA;rA;rU;rA;rA;rG;rA;rU;rC;rC;rU;rU | 17046 |
| rC;rA;rU;rU;rG;rU;rC;rU;rC;rC;rG;rA;rA;rG;rA;rA;rA;rU;rA;rA;rG;rA;rU;omeC;omeC;rU;rU | 17047 |
| rU;rU;rC;rA;rA;rU;rG;rG;rU;rG;rG;rA;rA;rC;rA;rG;rA;rU;rC;dT;dT | 17048 |
| rU;rG;rG;rU;rG;rG;rA;rA;rC;rA;rG;rA;rU;rC;rU;rU;rC;rA;rU;dT;dT | 17049 |
| rU;rC;rA;rG;rG;rC;rA;rC;rU;rC;rC;rU;rC;rA;rA;rU;rU;rG;rC;dT;dT | 17050 |
| rU;rU;rA;rA;rU;rC;rA;rG;rG;rC;rA;rC;rU;rC;rC;rU;rC;rA;rA;dT;dT | 17051 |
| rU;rA;rA;rG;rU;rA;rU;rG;rC;rU;rA;rG;rA;rG;rU;rC;rC;rC;rG;dT;dT | 17052 |
| rU;rC;rG;rC;rU;rG;rU;rC;rU;rG;rG;rC;rU;rG;rU;rC;rA;rG;rU;dT;dT | 17053 |
| rA;rU;rU;rC;rU;rU;rU;rU;rG;rG;rU;rC;rG;rC;rU;rG;rU;rC;rU;dT;dT | 17054 |
| rC;rT;rC;rC;rG;rA;rA;rG;rA;rA;rA;rT;rA;rA;rG;rA;rT;rC;rC;dT;dT | 17055 |
| rC;rA;rU;rU;rG;rU;rC;rU;rC;rC;rG;rA;rA;rG;rA;rA;rA;rU;rA;rA;rG;rA;rU;rC;rC;rU;rU | 17056 |
| rC;rA;rU;rU;rG;rU;rC;rU;rC;rC;rG;rA;rA;rG;rA;rA;rA;rU;rA;rA;rG;rA;rU;rC;rC;rU;rU | 17057 |
| rA;rA;rU;rU;rG;rU;rC;rU;rC;rC;rG;rA;rA;rG;rA;rA;rA;rU;rA;rA;rG;rA;rU;rC;rC;rU;rU | 17058 |
| rC;rA;rT;rT;rG;rT;rC;rT;rC;rC;rG;rA;rA;rG;rA;rA;rA;rT;rA;rA;rG;rA;rT;rC;rC;rU;rU | 17059 |
| rC;rA;rU;rU;rG;rU;rC;rU;rC;rC;rG;rA;rA;rG;rA;rA;rA;rU;rA;rA;rG;rA;rU;omeC;omeC;rU;rU | 17060 |
| rC;rA;rU;rU;rG;rU;rC;rU;rC;rC;rG;rA;rA;rG;rA;rA;rA;rU;rA;rA;rG;rA;rU;rC;rC;rU;rU | 17061 |
| rC;rA;rU;rU;rG;rU;rC;rU;rC;rC;rG;rA;rA;rG;rA;rA;rA;rU;rA;rA;rG;rA;rU;rC;rC;rU;rU | 17062 |
| rC;rA;rU;rU;rG;rU;rC;rU;rC;rC;rG;rA;rA;rG;rA;rA;rA;rU;rA;rA;rG;rA;rU;rC;rC;rU;rU | 17063 |
| rC;rA;rT;rT;rG;rT;rC;rT;rC;rC;rG;rA;rA;rG;rA;rA;rA;rT;rA;rA;rG;rA;rT;rC;rC;rT;rT | 17064 |
| rC;rA;rT;rT;rG;rT;rC;rT;rC;rC;rG;rA;rA;rG;rA;rA;rA;rT;rA;rA;rG;rA;rT;rC;rC;rU;rU | 17065 |

[0162] A multi-letter code shown in Table 8 has been used in describing the siRNA structures in Tables 6 and 7 to unambiguously represent each sequence. In this code, the prefix “ribo” or “r” signifies an RNA nucleoside. The prefixes “d,” “ome,” and “r” refer only to the letter immediately following the prefix.

TABLE 8
siRNA Structure Code

| Code | Represents |
|---|---|
| Cy5 | Cy5 fluorescent dye |
| dA | deoxyadenosine |
| dC | deoxycytidine |
| dG | deoxyguanosine |
| dT | deoxythymidine |
| omeA | 2′-O-methyl adenosine |
| omeC | 2′-O-methyl cytidine |
| omeG | 2′-O-methyl guanosine |
| omeU | 2′-O-methyl uridine |
| p | 5′ phosphate |
| rA | (ribo)adenosine |
| rC | (ribo)cytidine |
| rG | (ribo)guanosine |
| rI | (ribo)inosine |
| rT | (ribo)thymidine |
| | (5-methyluridine) |
| rU | (ribo)uridine |

[0163] In Table 9, the top nine siRNA sites identified from laboratory screening studies have been identified.

TABLE 9

Top nine siRNA sites as identified from lab-
oratory screening studies, showing conserved
and minor variant 19-mer sequences from the
Influenza A

| | | | | |
|---|---|---|---|---|
| Seq | Ref | | | % |
| ID | ID | Segment | Match Seq | Total |

| | | | | |
|---|---|---|---|---|
| 17066 | 7 | PB2 | AGACAGCGACCAAAAGAAU | 99.1% |
| 17067 | 7 | | AGACAGCGACCAAAAGgAU | 0.3% |
| 17068 | 7 | | AGACAGCGACCAAAgGAAU | 0.1% |
| 17069 | 7 | | AGACAGCGACCAAAAGAuU | 0.1% |
| 17070 | 7 | | AGACgaCGAuCAAAAGAAU | 0.1% |
| 17071 | 17 | PB2 | ACUGACAGCCAGACAGCGA | 99.0% |
| 17072 | 17 | | ACUGACAGuCAGACAGCGA | 0.2% |
| 17073 | 17 | | ACUGAuAGCCAGACAGCGA | 0.3% |
| 17074 | 17 | | ACcGACAGCCAGACAGCGA | 0.2% |
| 17075 | 17 | | ACUGACAGCCAGACgaCGA | 0.1% |
| 17076 | 48 | PB2 | CGGGACUCUAGCAUACUUA | 98.0% |
| 17077 | 48 | | CGGGACUCUAGCAUgCUUA | 0.1% |
| 17078 | 48 | | CGGGACUuUAGCAUACUUA | 0.2% |
| 17079 | 48 | | aGGGACUCUAGCAUACUUA | 0.1% |
| 17080 | 48 | | CGaGACUCUAGCAUACUUA | 0.4% |
| 17081 | 48 | | CGGaACUCUAGCAUACUUA | 0.6% |
| 17082 | 48 | | CGGGACUaUAGCAUACUUA | 0.1% |
| 17083 | 48 | | CGGGACUCcAGCAUACUUA | 0.3% |
| 17084 | 48 | | CGGGACUCUAaCAUACUUA | 0.1% |
| 17085 | 1187 | PB1 | GAUCUGUUCCACCAUUGAA | 90.9% |
| 17086 | 1187 | | GAUCUGUUuCACCAUUGAA | 0.7% |
| 17087 | 1187 | | aAUCUGUUCCACCAUUGAA | 0.1% |
| 17088 | 1187 | | GAcCUGUUCCACCAUUGAA | 6.9% |
| 17089 | 1187 | | GAUCUGcUCCACCAUUGAA | 0.2% |
| 17090 | 1187 | | GAUCUGUUaCACCAUUGAA | 0.1% |
| 17091 | 1187 | | GAUCUGUUCCACCAUUaAA | 0.1% |
| 17092 | 1187 | | GAcCUGUUCuACCAUUGAA | 0.1% |
| 17093 | 1187 | | GAcCUGcUCCACCAUUGAA | 0.3% |
| 17094 | 1206 | PB1 | AUGAAGAUCUGUUCCACCA | 88.6% |
| 17095 | 1206 | | AUGAAGAUCUGUUuCACCA | 0.7% |
| 17096 | 1206 | | AUGAgGAUCUGUUCCACCA | 0.2% |
| 17097 | 1206 | | AcGAAGAUCUGUUCCACCA | 0.1% |
| 17098 | 1206 | | AUGAAaAUCUGUUCCACCA | 0.1% |
| 17099 | 1206 | | AUGAAGAcCUGUUCCACCA | 6.8% |
| 17100 | 1206 | | AUGAAGAUCUGcUCCACCA | 0.2% |
| 17101 | 1206 | | AUGAAGAUCUGUUaCACCA | 0.1% |
| 17102 | 1206 | | cUGAAGAUCUGUUCCACCA | 0.1% |
| 17103 | 1206 | | uUGAAGAUCUGUUCCACCA | 2.0% |
| 17104 | 1206 | | AUGAAGAcCUGUUCuACCA | 0.1% |
| 17105 | 1206 | | AUaAAGAcCUGUUCCACCA | 0.1% |
| 17106 | 1206 | | AUGAAGAcCUGcUCCACCA | 0.2% |
| 17107 | 2393 | PA | UUGAGGAGUGCCUGAUUAA | 98.7% |
| 17108 | 2393 | | UUGAGGAGUGCCUGgUUAA | 0.1% |
| 17109 | 2393 | | UUGAGGAaUGCCUGAUUAA | 1.0% |
| 17110 | 2393 | | UUGAGGAGUGCCUaAUUAA | 0.2% |
| 17111 | 2394 | PA | GCAAUUGAGGAGUGCCUGA | 98.6% |
| 17112 | 2394 | | GCAAUUGAGGAGUGCCUGg | 0.1% |
| 17113 | 2394 | | GCAgUUGAGGAGUGCCUGA | 0.1% |
| 17114 | 2394 | | GCAAUUGAGGAaUGCCUGA | 1.0% |
| 17115 | 2394 | | GCAAUUGAGGAGUGCCUaA | 0.2% |
| 17116 | 3560 | NP | GAUCUUAUUUCUUCGGAGA | 96.0% |
| 17117 | 3560 | | GAUCUUAUUUCUUCGGgGA | 1.7% |
| 17118 | 3560 | | GAUCUUAUUUCUUuGGAGA | 0.2% |
| 17119 | 3560 | | GgUCUUAUUUCUUCGGAGA | 0.9% |
| 17120 | 3560 | | GuUCUUAUUUCUUCGGAGA | 1.1% |
| 17121 | 3561 | NP | GGAUCUUAUUUCUUCGGAG | 96.0% |
| 17122 | 3561 | | GGAUCUUAUUUCUUCGGgG | 1.7% |
| 17123 | 3561 | | GGAUCUUAUUUCUUuGGAG | 0.2% |
| 17124 | 3561 | | GGgUCUUAUUUCUUCGGAG | 0.9% |
| 17125 | 3561 | | GGuUCUUAUUUCUUCGGAG | 1.1% |

[0164] Madin-Darby canine kidney cells (MDCK) were used. For electroporation, the cells were kept in serum-free RPMI 1640 medium. Virus infections were done in infection medium. Influenza viruses A/PR/8/34 (PR8) and A/WSN/33 (WSN), subtypes H1N1 were used. Sense and antisense sequences that were tested are listed in Table 10.

TABLE 10

siRNA Sequences

| | |
|---|---|
| Name | siRNA sequence (5′–3′) |

| | | |
|---|---|---|
| PB2-2210/2230 (sense) | ggagacgugguguugguaadTdT | (SEQ ID NO: 17126) |
| PB2-2210/2230 (antisense) | uuaccaacaccacgucuccdTdT | (SEQ ID NO: 17127) |
| PB2-2240/2260 (sense) | cgggacucuagcauacuuadTdT | (SEQ ID NO: 17128) |
| PB2-2240/2260 (antisense) | uaaguaugcuagagucccgdTdT | (SEQ ID NO: 17129) |
| PB1-6/26 (sense) | gcaggcaaaccauuugaaudTdT | (SEQ ID NO: 17130) |
| PB1-6/26 (antisense) | auucaaaugguuugccugcdTdT | (SEQ ID NO: 17131) |
| PB1-129/149 (sense) | caggauacaccauggauacdTdT | (SEQ ID NO: 17132) |
| PB1-129/149 (antisense) | guauccaugguguauccugdTdT | (SEQ ID NO: 17133) |
| PB1-2257/2277 (sense) | gaucuguuccaccauugaadTdT | (SEQ ID NO: 17134) |
| PB1-2257/2277 (antisense) | uucaaugguggaacagaucdTdT | (SEQ ID NO: 17135) |
| PA-44/64 (sense) | ugcuucaauccgaugauugdTdT | (SEQ ID NO: 17136) |
| PA-44/64 (antisense) | caaucaucggauugaagcadTdT | (SEQ ID NO: 17137) |
| PA-739/759 (sense) | cggcuacauugagggcaagdTdT | (SEQ ID NO: 17138) |
| PA-739/759 (antisense) | cuugcccucaauguagccgdTdT | (SEQ ID NO: 17139) |
| PA-2087/2107 (G) (sense) | gcaauugaggagugccugadTdT | (SEQ ID NO: 17140) |
| PA-2087/2107 (G) (antisense) | ucaggcacuccucaauugcdTdT | (SEQ ID NO: 17141) |
| PA-2110/2130 (sense) | ugaucccuggguuuugcuudTdT | (SEQ ID NO: 17142) |
| PA-2110/2130 (antisense) | aagcaaaacccagggaucadTdT | (SEQ ID NO: 17143) |
| PA-2131/2151 (sense) | ugcuucuugguucaacuccdTdT | (SEQ ID NO: 17144) |
| PA-2131/2151 (antisense) | ggaguugaaccaagaagcadTdT | (SEQ ID NO: 17145) |
| NP-231/251 (sense) | uagagagaauggugcucucdTdT | (SEQ ID NO: 17146) |
| NP-231/251 (antisense) | gagagcaccauucucucuadTdT | (SEQ ID NO: 17147) |
| NP-390/410 (sense) | uaaggcgaaucuggcgccadTdT | (SEQ ID NO: 17148) |
| NP-390/410 (antisense) | uggcgccagauucgccuuadTdT | (SEQ ID NO: 17149) |
| NP-1496/1516 (sense) | ggaucuuauuucuucggagdTdT | (SEQ ID NO: 17150) |
| NP-1496/1516 (antisense) | cuccgaagaaauaagauccdTdT | (SEQ ID NO: 17151) |
| NP-1496/1516a (sense) | ggaucuuauuucuucggagadTdT | (SEQ ID NO: 17152) |
| NP-1496/1516a (antisense) | ucuccgaagaaauaagauccdTdT | (SEQ ID NO: 17153) |
| M-37/57 (sense) | ccgaggucgaaacguacgudTdT | (SEQ ID NO: 17154) |
| M-37/57 (antisense) | acguacguuucgaccucggdTdT | (SEQ ID NO: 17155) |
| M-480/500 (sense) | cagauugcugacucccagcdTdT | (SEQ ID NO: 17156) |
| M-480/500 (antisense) | gcugggagucagcaaucugdTdT | (SEQ ID NO: 17157) |
| M-598/618 (sense) | uggcuggaucgagugagcadTdT | (SEQ ID NO: 17158) |
| M-598/618 (antisense) | ugcucacucgauccagccadTdT | (SEQ ID NO: 17159) |
| M-934/954 (sense) | gaauaucgaaaggaacagcdTdT | (SEQ ID NO: 17160) |
| M-934/954 (antisense) | gcuguuccuuucgauauucdTdT | (SEQ ID NO: 17161) |
| NS-128/148 (sense) | cggcuucgccgagaucagadAdT | (SEQ ID NO: 17162) |
| NS-128/148 (antisense) | ucugaucucggcgaagccgdAdT | (SEQ ID NO: 17163) |
| NS-562/582 (R) (sense) | guccuccgaugaggacuccdTdT | (SEQ ID NO: 17164) |
| NS-562/582 (R) (antisense) | ggaguccucaucggaggacdTdT | (SEQ ID NO: 17165) |
| NS-589/609 (sense) | ugauaacacaguucgagucdTdT | (SEQ ID NO: 17166) |
| NS-589/609 (antisense) | gacucgaacuguguuaucadTdT | (SEQ ID NO: 17167) |

[0165] All siRNAs were synthesized by Dharmacon Research (Lafayette, Colo.) using 2′ACE protection chemistry and transfected into the cells by electroporation. Six to eight h following electroporation, the serum-containing medium was washed away and PR8 or WSN virus at the appropriate multiplicity of infection was inoculated into the wells. Cells were infected with either 1,000 PFU (one virus per 1,000 cells; MOI=0.001) or 10,000 PFU (one virus per 100 cells; MOI=0.01) of virus. After 1 h incubation at room temperature, 2 ml of infection medium with 4 μg/ml of trypsin was added to each well and the cells were incubated and, at indicated times, supernatants were harvested from infected cultures and the titer of virus was determined by hemagglutination of chicken erythrocytes.

[0166] Supernatants were harvested at 24, 36, 48, and 60 hours after infection. Viral titer was measured using a standard hemagglutinin assay as described in Knipe, D. M. and P. M. Howley, Fundamental Virology, 4th ed., pp. 34-35. The hemagglutination assay was done in V-bottomed 96-well plates. Serial 2-fold dilutions of each sample were incubated for 1 h on ice with an equal volume of a 0.5% suspension of chicken erythrocytes (Charles River Laboratories). Wells containing an adherent, homogeneous layer of erythrocytes were scored as positive. For plaque assays, serial 10-fold dilutions of each sample were titered for virus as described in Fundamental Virology, 4th ed., p. 32, as well known in the art.

[0167] To investigate the feasibility of using siRNA to suppress influenza virus replication, various influenza virus A RNAs were targeted. Specifically, the MDCK cell line, which is readily infected and widely used to study influenza virus, was utilized.

[0168] Each siRNA was individually introduced into populations of MDCK cells by electroporation. siRNA targeted to GFP (sense: 5′-GGCUACGUCCAGGAGCGCAUU-3′ (SEQ ID NO: 17168); antisense: 5′-UGCGCUCCUGGACGUAGCCUU-3′ (SEQ ID NO: 17169)) was used as control. This siRNA is referred to as GFP-949. In subsequent experiments (described in examples below) the UU overhang at the 3′ end of both strands was replaced by dTdT with no effect on results. A mock electroporation was also performed as a control. Eight hours after electroporation cells were infected with either influenza A virus PR8 or WSN at an MOI of either 0.1 or 0.01 and were analyzed for virus production at various time points (24, 36, 48, 60 hours) thereafter using a standard hemagglutination assay. GFP expression was assayed by flow cytometry using standard methods.

[0169] The ability of individual siRNAs to inhibit replication of influenza virus A strain A/Puerto Rico/8/34 (H1N1) or influenza virus A strain A/WSN/33 (H1N1) was determined by measuring HA titer. Thus a high HA titer indicates a lack of inhibition while a low HA titer indicates effective inhibition. MDCK cells were infected at an MOI of 0.01. For these experiments one siRNA that targets the PB1 segment (PB1-2257/2277), one siRNA that targets the PB2 segment (PB2-2240/2260), one siRNA that targets the PA segment (PA-2087/2107 (G)), and three different siRNAs that target the NP genome and transcript (NP-231/251, NP-390/410, and NP-1496/1516) were tested.

[0170] In the absence of siRNA (mock TF) or the presence of control (GFP) siRNA, the titer of virus increased over time, reaching a peak at approximately 48-60 hours after infection. In contrast, at 60 hours the viral titer was significantly lower in the presence of any of the siRNAs. For example, in strain WSN the HA titer (which reflects the level of virus) was approximately half as great in the presence of siRNAs PB2-2240 or NP-231 than in the controls. In particular, the level of virus was below the detection limit (10,000 PFU/ml) in the presence of siRNA NP-1496 in both strains. This represents a decrease by a factor of more than 60-fold in the PR8 strain and more than 120-fold in the WSN strain. The level of virus was also below the detection limit (10,000 PFU/ml) in the presence of siRNA PA-2087(G) in strain WSN and was extremely low in strain PR8. Suppression of virus production by siRNA was evident even from the earliest time point measured. Effective suppression, including suppression of virus production to undetectable levels (as determined by HA titer) has been observed at time points as great as 72 hours post-infection.

[0171] A total of twenty siRNAs, targeted to 6 segments of the influenza virus genome (PB2, PB1, PA, NP, M and NS), were tested in the MDCK cell line system. About 15% of the siRNA (PB1-2257, PA-2087G and NP-1496) tested displayed a strong effect, inhibiting viral production by more than 100 fold in most cases at MOI=0.001 and by 16 to 64 fold at MOI=0.01, regardless of whether PR8 or WSN virus was used. In particular, when siRNA NP-1496 or PA-2087 was used, inhibition was so pronounced that culture supernatants lacked detectable hemagglutinin activity. These potent siRNAs target 3 different viral gene segments: PB1 and PA, which are involved in the RNA transcriptase complex, and NP which is a single-stranded RNA binding nucleoprotein. Consistent with findings in other systems, the sequences targeted by these siRNAs are all positioned relatively close to the 3-prime end of the coding region.

[0172] Approximately 40% of the siRNAs significantly inhibited virus production, but the extent of inhibition varied depending on certain parameters. Approximately 15% of siRNAs potently inhibited virus production regardless of whether PR8 or WSN virus was used. However, in the case of certain siRNAs, the extent of inhibition varied somewhat depending on whether PR8 or WSN was used. Some siRNAs significantly inhibited virus production only at early time points (24 to 36 hours after infection) or only at lower dosage of infection (MOI=0.001), such as PB2-2240, PB1-129, NP-231 and M-37. These siRNAs target different viral gene segments, and the corresponding sequences are positioned either close to 3-prime end or 5-prime end of the coding region. Approximately 45% of the siRNAs had no discernible effect on the virus titer, indicating that they were not effective in interfering with influenza virus production in MDCK cells. In particular, none of the four siRNAs which target the NS gene segment showed any inhibitory effect.

[0173] To estimate virus titers more precisely, plaque assays with culture supernatants were performed (at 60 hrs) from culture supernatants obtained from virus-infected cells that had undergone mock transfection or transfection with NP-1496. Approximately 6×10⁵ pfu/ml was detected in mock supernatant, whereas no plaques were detected in undiluted NP-1496 supernatant. As the detection limit of the plaque assay is about 20 pfu (plaque forming unit)/ml, the inhibition of virus production by NP-1496 is at least about 30,000 fold. Even at an MOI of 0.1, NP-1496 inhibited virus production about 200-fold.

[0174] To determine the potency of siRNA, a graded amount of NP-1496 was transfected into MDCK cells followed by infection with PR8 virus. Virus titers in the culture supernatants were measured by hemagglutinin assay. As the amount of siRNA decreased, virus titer increased in the culture supernatants. However, even when as little as 25 pmol of siRNA was used for transfection, approximately 4-fold inhibition of virus production was detected as compared to mock transfection, indicating the potency of NP-1496 siRNA in inhibiting influenza virus production.

[0175] For therapy, it is desirable for siRNA to be able to effectively inhibit an existing virus infection. In a typical influenza virus infection, new virions are released beginning at about 4 hours after infection. To determine whether siRNA could reduce or eliminate infection by newly released virus in the face of an existing infection, MDCK cells were infected with PR8 virus and then transfected with NP-1496 siRNA. Virus titer increased steadily over time following mock transfection, whereas virus titer increased only slightly in NP-1496 transfected cells. Thus administration of siRNA after virus infection is effective.

[0176] Together, these results show that (i) certain siRNAs can potently inhibit influenza virus production; (ii) influenza virus production can be inhibited by siRNAs specific for different viral genes, including those encoding NP, PA, and PB1 proteins; and (iii) siRNA inhibition occurs in cells that were infected previously in addition to cells infected simultaneously with or following administration of siRNAs.

### EXAMPLE 3

### siRNAs That Target Viral RNA Polymerase or Nucleoprotein Inhibit Influenza A Virus Production in Chicken Embryos

[0177] siRNA-oligofectamine complex formation and chicken embryo inoculation. SiRNAs were prepared as described above. Chicken eggs were maintained under standard conditions. 30 μl of Oligofectamine (product number: 12252011 from Life Technologies, now Invitrogen) was mixed with 30 μl of Opti-MEM I (Gibco) and incubated at RT for 5 min. 2.5 nmol (10 μl) of siRNA was mixed with 30 μl of Opti-MEM I and added into diluted oligofectamine. The siRNA and oligofectamine was incubated at RT for 30 min. 10-day old chicken eggs were inoculated with siRNA-oligofectamine complex together with 100 μl of PR8 virus (5000 pfu/ml). The eggs were incubated at 37° C. for indicated time and allantoic fluid was harvested. Viral titer in allantoic fluid was tested by HA assay as described above.

[0178] To confirm the results in MDCK cells, the ability of siRNA to inhibit influenza virus production in fertilized chicken eggs was also assayed. Because electroporation cannot be used on eggs, Oligofectamine, a lipid-based agent that has been shown to facilitate intracellular uptake of DNA oligonucleotides as well as siRNAs in vitro was used (25). Briefly, PR8 virus alone (500 pfu) or virus plus siRNA-oligofectamine complex was injected into the allantoic cavity of 10-day old chicken eggs. Allantoic fluids were collected 17 hours later for measuring virus titers by hemagglutinin assay. When virus was injected alone (in the presence of Oligofectamine), high virus titers were readily detected. Co-injection of GFP-949 did not significantly affect the virus titer. (No significant reduction in virus titer was observed when Oligofectamine was omitted.) The injection of siRNAs specific for influenza virus showed results consistent with those observed in MDCK cells: The same siRNAs (NP-1496, PA2087 and PB1-2257) that inhibited influenza virus production in MDCK cells also inhibited virus production in chicken eggs, whereas the siRNAs (NP-231, M-37 and PB1-129) that were less effective in MDCK cells were ineffective in fertilized chicken eggs. Thus, siRNAs are also effective in interfering with influenza virus production in fertilized chicken eggs.

### EXAMPLE 4

### siRNA Inhibits Influenza Virus Production at the mRNA Level

[0179] siRNA preparation was performed as described above.

[0180] RNA extraction, reverse transcription and real time PCR. 1×10⁷ MDCK cells were electroporated with 2.5 nmol of NP-1496 or mock electroporated (no siRNA). Eight hours later, influenza A PR8 virus was inoculated into the cells at MOI=0.1. At times 1, 2, and 3-hour post-infection, the supernatant was removed, and the cells were lysed with Trizol reagent (Gibco). RNA was purified according to the manufacturer's instructions. Reverse transcription (RT) was carried out at 37° C. for 1 hr, using 200 ng of total RNA, specific primers (see below), and Omniscript Reverse transcriptase kit (Qiagen) in a 20-μl reaction mixture according to the manufacturer's instructions. Primers specific for either mRNA, NP vRNA, NP cRNA, NS vRNA, or NS cRNA were as follows:

(SEQ ID NO: 17170)

mRNA, dT₁₈ =
5′-TTTTTTTTTTTTTTTTTT-3′

(SEQ ID NO: 17171)

NP vRNA, NP-367:
5′-CTCGTCGCTTATGACAAAGAAG-3′.

(SEQ ID NO: 17172)

NP cRNA, NP-1565R:
5′-ATATCGTCTCGTATTAGTAGAAACAAGGGTATTTTT-3′.

(SEQ ID NO: 17173)

NS vRNA, NS-527:
5′-CAGGACATACTGATGAGGATG-3′.

(SEQ ID NO: 17174)

NS cRNA, NS-890R:
5′-ATATCGTCTCGTATTAGTAGAAACAAGGGTGTTTT-3′.

1 μl of RT reaction mixture (i.e., the sample obtained by performing reverse transcription) and sequence-specific primers were used for real-time PCR using SYBR Green PCR master mix (AB Applied Biosystems) including SYBR Green I double-stranded DNA binding dye. PCRs were cycled in an ABI PRISM 7000 sequence detection system (AB applied Biosystem) and analyzed with ABI PRISM 7000 SDS software (AB Applied Biosystems). The PCR reaction was carried out at 50° C., 2 min, 95° C., 10 min, then 95° C., 15 sec and 60° C., 1 min for 50 cycles. Cycle times were analyzed at a reading of 0.2 fluorescence units. All reactions were done in duplicate. Cycle times that varied by more than 1.0 between the duplicates were discarded. The duplicate cycle times were then averaged and the cycle time of β-actin was subtracted from them for a normalized value. PCR primers were as follows.

| | |
|---|---|
| For NP RNAs | |
| NP-367: | |
| 5′-CTCGTCGCTTATGACAAAGAAG-3′. | (SEQ ID NO: 17171) |
| NP-460R: | |
| 5′-AGATCATCATGTGAGTCAGAC-3′. | (SEQ ID NO: 17175) |
| For NS RNAs: | |
| NS-527: | |
| 5′-CAGGACATACTGATGAGGATG-3′. | (SEQ ID NO: 17173) |
| NS-617R: | |
| 5′-GTTTCAGAGACTCGAACTGTG-3′. | (SEQ ID NO: 17176) |

[0181] As described above, during replication of influenza virus, vRNA is transcribed to produce cRNA, which serves as a template for more vRNA synthesis, and mRNA, which serves as a template for protein synthesis (1). Although RNAi is known to target the degradation of mRNA in a sequence-specific manner (16-18), there is a possibility that vRNA and cRNA are also targets for siRNA since vRNA of influenza A virus is sensitive to nuclease (1). To investigate the effect of siRNA on the degradation of various RNA species, reverse transcription using sequence-specific primers followed by real time PCR was used to quantify the levels of vRNA, cRNA and mRNA. The cRNA is the exact complement of vRNA, but mRNA contains a polyA sequence at the 3′ end, beginning at a site complementary to a site 15-22 nucleotides downstream from the 5′ end of the vRNA segment. Thus compared to vRNA and cRNA, mRNA lacks 15 to 22 nucleotides at the 3′ end. To distinguish among the three viral RNA species, primers specific for vRNA, cRNA and mRNA were used in the first reverse transcription reaction. For mRNA, poly dT18 was used as primer. For cRNA, a primer complementary to the 3′ end of the RNA that is missing from mRNA was used. For vRNA, the primer can be almost anywhere along the RNA as long as it is complementary to vRNA and not too close to the 5′ end. The resulting cDNA transcribed from only one of the RNAs was amplified by real time PCR.

[0182] Following influenza virus infection, new virions are starting to be packaged and released by about 4 hrs. To determine the effect of siRNA on the first wave of mRNA and cRNA transcription, RNA was isolated early after infection. Briefly, NP-1496 was electroporated into MDCK cells. A mock electroporation (no siRNA) was also performed). Six to eight hours later, cells were infected with PR8 virus at MOI=0.1. The cells were then lysed at 1, 2 and 3 hours post-infection and RNA was isolated. The levels of mRNA, vRNA and cRNA were assayed by reverse transcription using primers for each RNA species, followed by real time PCR.

[0183] One hour after infection, there was no significant difference in the amount of NP mRNA between samples with or without NP siRNA transfection. As early as 2 hours post-infection, NP mRNA increased by 38 fold in the mock transfection group, whereas the levels of NP mRNA did not increase (or even slightly decreased) in cells transfected with siRNA. Three hours post-infection, mRNA transcript levels continued to increase in the mock transfection whereas a continuous decrease in the amount of NP mRNA was observed in the cells that received siRNA treatment. NP vRNA and cRNA displayed a similar pattern except that the increase in the amount of vRNA and cRNA in the mock transfection was significant only at 3 hrs post-infection.

[0184] These results indicate that, consistent with the results of measuring intact, live virus by hemagglutinin assay or plaque assay, the amounts of all NP RNA species were also significantly reduced by the treatment with NP siRNA. Although it is known that siRNA mainly mediates degradation of mRNA, the data from this experiment does not exclude the possibility of siRNA-mediated degradation of NP cRNA and vRNA although the results described below suggest that reduction in NP protein levels as a result of reduction in NP mRNA results in decreased stability of NP cRNA and/or vRNA.

### EXAMPLE 5

### Identification of the Target of RNA Interference

[0185] siRNA preparation of unmodified siRNAs was performed as described above. Modified RNA oligonucleotides, in which the 2′-hydroxyl group was substituted with a 2′-O-methyl group at every nucleotide residue of either the sense or antisense strand, or both, were also synthesized by Dharmacon. Modified oligonucleotides were deprotected and annealed to the complementary strand.as described for unmodified oligonucleotides. siRNA duplexes were analyzed for completion of duplex formation by gel electrophoresis.

[0186] Cell culture, transfection with siRNAs, and infection with virus. These were performed essentially as described above. Briefly, for the experiment involving modified NP-1496 siRNA, MDCK cells were first transfected with NP-1496 siRNAs (2.5 nmol) formed from wild type (wt) and modified (m) strands and infected 8 hours later with PR8 virus at a MOI of 0.1. Virus titers in the culture supernatants were assayed 24 hours after infection. For the experiment involving M-37 siRNA, MDCK cells were transfected with M-37 siRNAs (2.5 nmol), infected with PR8 virus at an MOI of 0.01, and harvested for RNA isolation 1, 2, and 3 hours after infection. See Table 2 for M-37 sense and antisense sequences.

[0187] RNA extraction, reverse transcription and real time PCR were performed essentially as described above. Primers specific for either mRNA, M-specific vRNA, and M-specific cRNA, used for reverse transcription, were as follows:

(SEQ ID NO: 17170)

mRNA, dT₁₈ =
5′-TTTTTTTTTTTTTTTTTT-3′

(SEQ ID NO: 17177)

M vRNA:
5′-CGCTCAGACATGAGAACAGAATGG-3′

(SEQ ID NO: 17178)

M cRNA:
5′-ATATCGTCTCGTATTAGTAGAAACAAGGTAGTTTTT-3′.

PCR primers for M RNAs were as follows:

| | |
|---|---|
| M forward: | |
| 5′-CGCTCAGACATGAGAACAGAATGG-3′ | (SEQ ID NO: 17177) |
| M reverse: | |
| 5′-TAACTAGCCTGACTAGCAACCTC-3′ | (SEQ ID NO: 17179) |

[0188] To investigate the possibility that siRNA might interfere with vRNA and/or cRNA in addition to mRNA, NP-1496 siRNAs in which either the sense (S or +) or antisense (AS or −) strand was modified were synthesized. The modification, which substitutes a 2′-O-methyl group for the 2′-hydroxyl group in every nucleotide residue, does not affect base-pairing for duplex formation, but the modified RNA strand no longer supports RNA interference. In other words, an siRNA in which the sense strand is modified but the antisense strand is wild type will support degradation of RNAs having a sequence complementary to the antisense strand but not a sequence complementary to the sense strand. Conversely, an siRNA in which the sense strand is wild type but the antisense strand is modified will support degradation of RNAs having a sequence complementary to the sense strand but will not support degradation of RNAs having a sequence complementary to the sense strand.

[0189] MDCK cells were either mock transfected or transfected with NP-1496 siRNAs in which either the sense strand or the antisense strand, was modified while the other strand was wild type. Cells were also transfected with NP-1496 siRNA in which both strands were modified. Cells were then infected with PR8 virus, and virus titer in supernatants was measured. High virus titers were detected in cultures subjected to mock transfection. As expected, very low virus titers were detected in cultures transfected with wild type siRNA, but high virus titers were detected in cultures transfected with siRNA in which both strands were modified. Virus titers were high in cultures transfected with siRNA in which the antisense strand was modified, whereas the virus titers were low in cultures transfected with siRNA in which the sense strand only was modified. While not wishing to be bound by any theory, the inventors suggest that the requirement for a wild type antisense (−) strand of siRNA duplex to inhibit influenza virus production suggests that the target of RNA interference is either mRNA (+) or cRNA (+) or both.

[0190] To further distinguish these possibilities, the effect of siRNA on the accumulation of corresponding mRNA, vRNA, and cRNA was examined. To follow transcription in a cohort of simultaneously infected cells, siRNA-transfected MDCK cells were harvested for RNA isolation 1, 2, and 3 hours after infection (before the release and re-infection of new virions). The viral mRNA, vRNA, and cRNA were first independently converted to cDNA by reverse transcription using specific primers. Then, the level of each cDNA was quantified by real time PCR. When M-specific siRNA M-37 was used, little M-specific mRNA was detected one or two hours after infection. Three hours after infection, M-specific mRNA was readily detected in the absence of M-37. In cells transfected with M-37, the level of M-specific mRNA was reduced by approximately 50%. In contrast, the levels of M-specific vRNA and cRNA were not inhibited by the presence of M-37. While not wishing to be bound by any theory, these results indicate that viral mRNA is probably the target of siRNA-mediated interference.

### EXAMPLE 6

### Effects of Certain siRNAs on Viral RNA Accumulation

[0191] siRNA preparation was performed as described above. Primers were specific for either mRNA, NP vRNA, NP cRNA, NS vRNA, NS cRNA, M vRNA, or M cRNA. Primers specific for PB1 vRNA, PB1 cRNA, PB2 vRNA, PB2 cRNA, PA vRNA, or PA cRNA, used for reverse transcription, were as follows:

(SEQ ID NO: 17180)

| | |
|---|---|
| PB1 vRNA: | 5′-GTGCAGAAATCAGCCCGAATGGTTC-3′ |

(SEQ ID NO: 17181)

| | |
|---|---|
| PB1 cRNA: | 5′-ATATCGTCTCGTATTAGTAGAAACAAGGCATTT-3′ |

(SEQ ID NO: 17182)

| | |
|---|---|
| PB2 vRNA: | 5′-GCGAAAGGAGAGAAGGCTAATGTG-3′ |

(SEQ ID NO: 17183)

| | |
|---|---|
| PB2 cRNA: | 5′-ATATGGTCTCGTATTAGTAGAAACAAGGTCGTTT-3′ |

(SEQ ID NO: 17184)

| | |
|---|---|
| PA vRNA: | 5′-GCTTCTTATCGTTCAGGCTCTTAGG-3′ |

(SEQ ID NO: 17185)

| | |
|---|---|
| PA cRNA: | 5′-ATATCGTCTCGTATTAGTAGAAACAAGGTACTT-3′ |

PCR primers for PB1, PB2, and PA RNAs were as follows:

(SEQ ID NO: 17186)

| | |
|---|---|
| PB1 forward: | 5′-CGGATTGATGCACGGATTGATTTC-3′ |

(SEQ ID NO: 17187)

| | |
|---|---|
| PB1 reverse: | 5′-GACGTCTGAGCTCTTCAATGGTGGAAC-3′ |

(SEQ ID NO: 17182)

| | |
|---|---|
| PB2 forward: | 5′-GCGAAAGGAGAGAAGGCTAATGTG-3′ |

(SEQ ID NO: 17188)

| | |
|---|---|
| PB2 reverse: | 5′-AATCGCTGTCTGGCTGTCAGTAAG-3′ |

(SEQ ID NO: 17184)

| | |
|---|---|
| PA forward: | 5′-GCTTCTTATCGTTCAGGCTCTTAGG-3′ |

(SEQ ID NO: 17189)

| | |
|---|---|
| PA reverse: | 5′-CCGAGAAGCATTAAGCAAAACCCAG-3′ |

To determine whether NP-1496 targets the degradation of the NP gene segment specifically or whether the levels of viral RNAs other than NP are also affected, primers specific for NS were used for RT and real time PCR to measure the amount of different NS RNA species (mRNA, vRNA, cRNA) as described above. The changes in NS mRNA, vRNA and cRNA showed the same pattern as that observed for NP RNAs. At 3 hours post-infection, a significant increase in all NS RNA species could be seen in mock transfected cells, whereas no significant changes in NS RNA levels were seen in the cells that received NP-1496 siRNA. This result indicates that the transcription and replication of different viral RNAs are coordinately regulated, at least with respect to NP RNAs. By coordinately regulated is meant that levels of one transcript affect levels of another transcript, either directly or indirectly. No particular mechanism is implied. When NP transcripts are degraded by siRNA treatment the levels of other viral RNAs are also reduced.

[0192] To further explore the effect of NP siRNAs on other viral RNAs, accumulation of mRNA, vRNA, and cRNA of all viral genes was measured in cells that had been treated with NP-1496. NP-specific mRNA was low one or two hours after infection. Three hours after infection, NP mRNA was readily detected in the absence of NP-1496, whereas in the presence of NP-1496, the level of NP mRNA remained at the background level, indicating that siRNA inhibited the accumulation of specific mRNA. Levels of NP-specific and NS-specific vRNA and cRNA were greatly inhibited by the presence of NP-1496. In addition, in the NP-1496-treated cells, the accumulation of mRNA, vRNA, and cRNA of the M, NS, PB1, PB2, and PA genes was also inhibited. Furthermore, the broad inhibitory effect was also observed for PA-2087. At three hours after infection PA, M, and NS mRNA were readily detected in the absence of PA-2087, whereas the presence of PA-2087 inhibited transcription of PA, M, and NS mRNA. At three hours after infection PA, M, and NS vRNA were readily detected in the absence of PA-2087, whereas the presence of PA-2087 inhibited accumulation of PA, M, and NS vRNA. At three hours after infection PA, M, and NS cRNA were readily detected in the absence of PA-2087, whereas the presence of PA-2087 inhibited accumulation of PA, M, and NS cRNA. In addition, NP-specific siRNA inhibits the accumulation of PB1-, PB2- and PA-specific mRNA.

[0193] The NP gene segment in influenza virus encodes a single-stranded RNA-binding nucleoprotein, which can bind to both vRNA and cRNA. During the viral life cycle, NP mRNA is first transcribed and translated. The primary function of the NP protein is to encapsidate the virus genome for the purpose of RNA transcription, replication and packaging. In the absence of NP protein, the full-length synthesis of both vRNA and cRNA is strongly impaired. When NP siRNA induces the degradation of NP RNA, NP protein synthesis is impaired and the resulting lack of sufficient NP protein subsequently affects the replication of other viral gene segments. In this way, NP siRNA could potently inhibit virus production at a very early stage.

[0194] The number of NP protein molecules in infected cells has been hypothesized to regulate the levels of mRNA synthesis versus genome RNA (vRNA and cRNA) replication (1). Using a temperature-sensitive mutation in the NP protein, previous studies have shown that cRNA, but not mRNA, synthesis was temperature sensitive both in vitro and in vivo. NP protein was shown to be required for elongation and antitermination of the nascent cRNA and vRNA transcripts. The results presented above show that NP-specific siRNA inhibited the accumulation of all viral RNAs in infected cells. While not wishing to be bound by any theory, it appears probable that in the presence of NP-specific siRNA, the newly transcribed NP mRNA is degraded, resulting in the inhibition of NP protein synthesis following virus infection. Without newly synthesized NP, further viral transcription and replication, and therefore new virion production is inhibited.

[0195] Similarly, in the presence of PA-specific, the newly transcribed PA mRNA is degraded, resulting in the inhibition of PA protein synthesis. Despite the presence of 30-60 copies of RNA transcriptase per influenza virion (1), without newly synthesized RNA transcriptase, further viral transcription and replication are likely inhibited. Similar results were obtained using siRNA specific for PB1. In contrast, the matrix (M) protein is not required until the late phase of virus infection (1). Thus, M-specific siRNA inhibits the accumulation of M-specific mRNA but not vRNA, cRNA, or other viral RNAs. Taken together, these findings demonstrate a critical requirement for newly synthesized nucleoprotein and polymerase proteins in influenza viral RNA transcription and replication. Both mRNA- and virus-specific mechanisms by which NP-, PA-, and PB1-specific siRNAs interfere with mRNA accumulation and other viral RNA transcription suggest that these siRNAs may be especially potent inhibitors of influenza virus infection.

### EXAMPLE 7

### Broad Inhibition of Influenza Virus RNA Accumulation by Certain siRNAs is Not Due to the Interferon Response or to Virus-Induced RNA Degradation

[0196] RNA levels were measured using PCR under standard conditions. The following PCR primers were used for measurement of γ-actin RNA.

(SEQ ID NO: 17190)

γ-actin forward:
5′-TCTGTCAGGGTTGGAAAGTC-3′

(SEQ ID NO: 17191)

γ-actin reverse:
5′-AAATGCAAACCGCTTCCAAC-3′

[0197] One possible cause for the broad inhibition of viral RNA accumulation described above is an interferon response of the infected cells in the presence of siRNA. Thus, the above experiments were repeated in Vero cells in which the entire IFN locus, including all α, β, and ω genes, are deleted. Just as in MDCK cells, the accumulation of NP-, M-, and NS-specific mRNAs were all inhibited by NP-1496. In addition, the effect of siRNA on the levels of transcripts from cellular genes, including β-actin, γ-actin, and GAPDH, was assayed using PCR. No significant difference in the transcript levels was detected in the absence or presence of siRNA indicating that the inhibitory effect of siRNA is specific for viral RNAs. These results suggest that the broad inhibition of viral RNA accumulation by certain siRNAs is not a result of a cellular interferon response.

[0198] Following influenza virus infection, the presence of dsRNA also activates a cellular pathway that targets RNA for degradation. To examine the effect of siRNA on the activation of this pathway, we assayed the levels of phosphorylated protein kinase R (PKR), the most critical component of the pathway. Transfection of MDCK cells with NP-1496 in the absence of virus infection did not affect the levels of activated PKR. Infection by influenza virus resulted in an increased level of phosphorylated PKR, consistent with previous studies. However, the increase was the same in the presence or absence of NP-1496. Thus, the broad inhibition of viral RNA accumulation is not a result of enhanced virus-induced degradation in the presence of siRNA.

### EXAMPLE 8

### Inhibition of Influenza Virus Production in Mice by siRNAs

[0199] This example describes experiments showing that administration of siRNAs targeted to influenza virus NP or PA transcripts inhibit production of influenza virus in mice when administered either prior to or following infection with influenza virus. The inhibition is dose-dependent and shows additive effects when two siRNAs each targeted to a transcript expressed from a different influenza virus gene were administered together. Materials and Methods:

[0200] siRNA preparation. This was performed as described above.

[0201] siRNA delivery. siRNAs (30 or 60 μg of GFP-949, NP-1496, or PA-2087) were incubated with jetPEI™ for oligonucleotides cationic polymer transfection reagent, N/P ratio=5 (Qbiogene, Inc., Carlsbad, Calif.; Cat. No. GDSP20130; N/P refers to the number of nitrogens per nucleotide phosphate in the jetPEI/siRNA mixture) or with poly-L-lysine (MW (vis) 52,000; MW (LALLS) 41,800, Sigma Cat. No. P2636) for 20 min at room temperature in 5% glucose. The mixture was injected into mice intravenously, into the retro-orbital vein, 200 μl per mouse, 4 mice per group. 200 μl 5% glucose was injected into control (no treatment) mice. The mice were anesthetized with 2.5% Avertin before siRNA injection or intranasal infection.

[0202] Viral infection. B6 mice (maintained under standard laboratory conditions) were intranasally infected with PR8 virus by dropping virus-containing buffer into the mouse's nose with a pipette, 30 ul (12,000 pfu) per mouse.

[0203] Determination of viral titer. Mice were sacrificed at various times following infection, and lungs were harvested. Lungs were homogenized, and the homogenate was frozen and thawed twice to release virus. PR8 virus present in infected lungs was titered by infection of MDCK cells. Flat-bottom 96-well plates were seeded with 3×10⁴ MDCK cells per well, and 24 hrs later the serum-containing medium was removed. 25 μl of lung homogenate, either undiluted or diluted from 1×10⁻¹ to 1×10⁻⁷, was inoculated into triplicate wells. After 1 h incubation, 175 μl of infection medium with 4 μg/ml of trypsin was added to each well. Following a 48 h incubation at 37° C., the presence or absence of virus was determined by hemagglutination of chicken RBC by supernatant from infected cells. The hemagglutination assay was carried out in V-bottom 96-well plates. Serial 2-fold dilutions of supernatant were mixed with an equal volume of a 0.5% suspension (vol/vol) of chicken erythrocytes (Charles River Laboratories) and incubated on ice for 1 h. Wells containing an adherent, homogeneous layer of erythrocytes were scored as positive. The virus titers were determined by interpolation of the dilution end point that infected 50% of wells by the method of Reed and Muench (TCID₅₀), thus a lower TCID₅₀ reflects a lower virus titer. The data from any two groups were compared by Student t test, which was used throughout the experiments described herein to evaluate significance.

[0204] siRNA targeted to viral NP transcripts inhibits influenza virus production in mice when administered prior to infection. 30 or 60 μg of GFP-949 or NP-1496 siRNAs were incubated with jetPEI and injected intravenously into mice as described above in Materials and Methods. Three hours later mice were intranasally infected with PR8 virus, 12000 pfu per mouse. Lungs were harvested 24 hours after infection. The average log₁₀ TCID₅₀ of the lung homogenate for mice that received no siRNA treatment or received an siRNA targeted to GFP was 4.2. In mice that were pretreated with 30 μg siRNA targeted to NP and jetPEI, the average log₁₀ TCID₅₀ of the lung homogenate was 3.9. In mice that were pretreated with 60 μg siRNA targeted to NP and jetPEI, the average log₁₀ TCID₅₀ of the lung homogenate was 3.2. The difference in virus titer in the lung homogenate between the group that received no treatment and the group that received 60 μg NP siRNA was significant with P=0.0002. Data for individual mice are presented in Table 11A.

[0205] siRNA targeted to viral NP transcripts inhibits influenza virus production in mice when administered intravenously prior to infection in a composition containing the cationic polymer PLL. 30 or 60 μg of GFP-949 or NP-1496 siRNAs were incubated with PLL and injected intravenously into mice as described above in Materials and Methods. Three hours later mice were intranasally infected with PR8 virus, 12000 pfu per mouse. Lungs were harvested 24 hours after infection. The average log₁₀ TCID₅₀ of the lung homogenate for mice that received no siRNA treatment (NT) or received an siRNA targeted to GFP (GFP 60 μg) was 4.1. In mice that were pretreated with 60 μg siRNA targeted to NP (NP 60 μg) and PLL, the average log₁₀ TCID₅₀ of the lung homogenate was 3.0. The difference in virus titer in the lung homogenate between the group that received 60 μg GFP and the group that received 60 μg NP siRNA was significant with P=0.001. Data for individual mice are presented in Table 11A. These data indicate that siRNA targeted to the influenza NP transcript reduced the virus titer in the lung when administered prior to virus infection. They also indicate that a mixtures of an siRNA with a cationic polymer effectively inhibits influenza virus in the lung when administered by intravenous injection, not requiring techniques such as hydrodynamic transfection.

TABLE 11A
Inhibition of influenza virus production in mice by siRNA with
cationic polymers

| | |
|---|---|
| Treatment | log₁₀TCID50 |

| | | | | |
|---|---|---|---|---|
| NT (jetPEI experiment) | 4.3 | 4.3 | 4.0 | 4.0 |
| GFP (60 μg) + jetPEI | 4.3 | 4.3 | 4.3 | 4.0 |
| NP (30 μg) + jetPEI | 4.0 | 4.0 | 3.7 | 3.7 |
| NP (60 μg) + jetPEI | 3.3 | 3.3 | 3.0 | 3.0 |
| NT (PLL experiment) | 4.0 | 4.3 | 4.0 | 4.0 |
| GFP (60 μg) + PLL | 4.3 | 4.0 | 4.0 | (not done) |
| NP (60 μg) + PLL | 3.3 | 3.0 | 3.0 | 2.7 |

siRNA targeted to viral NP transcripts inhibits influenza virus production in mice when administered prior to infection and demonstrates that the presence of a cationic polymer significantly increases the inhibitory efficacy of siRNA. 60 μg of GFP-949 or NP-1496 siRNAs were incubated with phosphate buffered saline (PBS) or jetPEI and injected intravenously into mice as described above in Materials and Methods. Three hours later mice were intranasally infected with PR8 virus, 12000 pfu per mouse. Lungs were harvested 24 hours after infection. The average log₁₀ TCID₅₀ of the lung homogenate for mice that received no siRNA treatment was 4.1, while the average log₁₀ TCID₅₀ of the lung homogenate for mice that received an siRNA targeted to GFP in PBS was 4.4. In mice that were pretreated with 60 μg siRNA targeted to NP in PBS the average log₁₀ TCID₅₀ of the lung homogenate was 4.2, showing only a modest increase in efficacy relative to no treatment or treatment with an siRNA targeted to GFP. In mice that were pretreated with 60 μg siRNA targeted to GFP in jetPEI, the average log₁₀ TCID₅₀ of the lung homogenate was 4.2. However, in mice that received 60 μg siRNA targeted to NP in jetPEI, the average log₁₀ TCID₅₀ of the lung homogenate was 3.2. The difference in virus titer in the lung homogenate between the group that received GFP siRNA in PBS and the group that received NP siRNA in PBS was significant with P=0.04, while the difference in virus titer in the lung homogenate between the group that received GFP siRNA with jetPEI and the group that received NP siRNA with jetPEI was highly significant with P=0.003. Data for individual mice are presented in Table 11B.

TABLE 11B
Inhibition of influenza virus production in mice by siRNA
showing increased efficacy with cationic polymer

| | |
|---|---|
| Treatment | log₁₀TCID50 |

| | | | | |
|---|---|---|---|---|
| NT | 4.3 | 4.3 | 4.0 | 3.7 |
| GFP (60 μg) + PBS | 4.3 | 4.3 | 4.7 | 4.3 |
| NP (60 μg) + PBS | 3.7 | 4.3 | 4.0 | 4.0 |
| GFP (60 μg) + jetPEI | 4.3 | 4.3 | 4.0 | 3.0 |
| NT (60 μg) + jetPEI | 3.3 | 3.0 | 3.7 | 3.0 |

### Additional experiments were performed to assess the ability of siRNA to inhibit influenza virus production at various times after infection, when administered at various time points prior to or following infection.

[0206] siRNA was administered as described above except that 120 ug siRNA was administered 12 hours before virus infection. Table 11C shows the results expressed as log₁₀ TCID₅₀. The P value comparing NP-treated with control group was 0.049

TABLE 11C

| | Mouse 1 | Mouse 2 | Mouse 3 | Mouse 4 |
|---|---|---|---|---|
| NT | 4.3 | 4 | 4 | 4 |
| GFP-949 | 4.3 | 4 | 4 | 4 |
| NP-1496 | 4 | 3.7 | 3.7 | 3.3 |

In another experiment, siRNA (60 ug) was administered 3 hours before infection. 1500 pfu of PR8 virus was administered intranasally. The infected lung was harvested 48 h after infection. Table 11D shows the results expressed as log₁₀ TCID₅₀. The P value comparing NP-treated with control group was 0.03.

TABLE 11D

| | Mouse 1 | Mouse 2 | Mouse 3 | Mouse 4 |
|---|---|---|---|---|
| NT | 4 | 4 | 4 | 4 |
| GFP-949 | 4.3 | 4 | 4 | 3.7 |
| NP-1496 | 3 | 3.7 | 3.7 | 3.3 |

In another experiment, siRNA (120 ug) was administered 24 hours after PR8 (1500 pfu) infection. 52 hours post-infection, the lung was harvested and virus titer was measured. Table 11E shows the results expressed as log₁₀ TCID₅₀. The P value comparing NP-treated with control group was 0.03.

TABLE 11E

| | Mouse 1 | Mouse 2 | Mouse 3 | Mouse 4 |
|---|---|---|---|---|
| GFP-949 | 2.3 | 2.7 | 2 | 2.7 |
| NP-1496 | 2 | 2 | 1.7 | 2 |

[0207] Other polymers were also shown to be effective siRNA delivery agents. FIG. 19D is a plot showing that siRNA targeted to NP (NP-1496) inhibits influenza virus production in mice when administered intravenously together with a poly(beta amino ester) (J28). siRNA targeted to NP (NP-1496) inhibits influenza virus production in mice when administered intraperitoneally together with a poly(beta amino ester) while a control RNA has no significant effect. The experiments were performed essentially as described above except that the ratio of polymer to siRNA was a weight/weight ratio (for instance, 60:1 w/w). Polymers and siRNA were mixed and administered to mice either intravenously or intraperitoneally 3 hours prior to intranasal infection with 12,000 pfu of PR8 virus. Lungs were harvested 24 hours later and HA assays were performed. The amine and bis(acrylate ester)monomers present in J28 and C32 are described and depicted in U.S. Ser. No. 10/446,444.

[0208] siRNAs targeted to different influenza virus transcripts exhibit an additive effect. Sixty μg of NP-1496 siRNA, 60 μg PA-2087 siRNA, or 60 μg NP-1496 siRNA+60 μg PA-2087 siRNA were incubated with jetPEI and injected intravenously into mice as described above. Three hours later mice were intranasally infected with PR8 virus, 12000 pfu per mouse. Lungs were harvested 24 hours after infection. The average log₁₀ TCID₅₀ of the lung homogenate for mice that received no siRNA treatment was 4.2. In mice that received 60 μg siRNA targeted to NP, the average log₁₀ TCID₅₀ of the lung homogenate was 3.2. In mice that received 60 μg siRNA targeted to PA, the average log₁₀ TCID₅₀ of the lung homogenate was 3.4. In mice that received 60 μg siRNA targeted to NP+60 μg siRNA targeted to PA, the average log₁₀ TCID₅₀ of the lung homogenate was 2.4. The differences in virus titer in the lung homogenate between the group that received no treatment and the groups that received 60 μg NP siRNA, 60 μg PA siRNA, or 60 μg NP siRNA+60 μg PA siRNA were significant with P=0.003, 0.01, and 0.0001, respectively. The differences in lung homogenate between the groups that received 60 μg NP siRNA or 60 μg NP siRNA and the group that received 60 μg NP siRNA+60 μg PA siRNA were significant with p=0.01. Data for individual mice are presented in Table 12. These data indicate that pretreatment with siRNA targeted to the influenza NP or PA transcript reduced the virus titer in the lungs of mice subsequently infected with influenza virus. The data further indicate that a combination of siRNA targeted to different viral transcripts exhibit an additive effect, suggesting that therapy with a combination of siRNAs targeted to different transcripts may allow a reduction in dose of each siRNA, relative to the amount of a single siRNA that would be needed to achieve equal efficacy.

TABLE 12
Additive effect of siRNA against influenza virus in mice

| | |
|---|---|
| Treatment | log₁₀TCID50 |

| | | | | |
|---|---|---|---|---|
| NT | 4.3 | 4.3 | 4.0 | 4.0 |
| NP (60 μg) | 3.7 | 3.3 | 3.0 | 3.0 |
| PA (60 μg) | 3.7 | 3.7 | 3.0 | 3.0 |
| NP + PA (60 μg each) | 2.7 | 2.7 | 2.3 | 2.0 |

siRNA targeted to viral NP transcripts inhibits influenza virus production in mice when administered following infection. Mice were intranasally infected with PR8 virus, 500 pfu. Sixty μg of GFP-949 siRNA, 60 μg PA-2087 siRNA, 60 μg NP-1496 siRNA, or 60 μg NP siRNA+60 μg PA siRNA were incubated with jetPEI and injected intravenously into mice 5 hours later as described above. Lungs were harvested 28 hours after administration of siRNA. The average log₁₀ TCID₅₀ of the lung homogenate for mice that received no siRNA treatment or received the GFP-specific siRNA GFP-949 was 3.0. In mice that received 60 μg siRNA targeted to PA, the average log₁₀ TCID₅₀ of the lung homogenate was 2.2. In mice that received 60 μg siRNA targeted to NP (NP 60 μg), the average log₁₀ TCID₅₀ of the lung homogenate was 2.2. In mice that received 60 μg NP siRNA+60 μg PA siRNA, the average log₁₀ TCID₅₀ of the lung homogenate was 1.8. The differences in virus titer in the lung homogenate between the group that received no treatment and the groups that received 60 μg PA, NP siRNA, or 60 μg NP siRNA+60 μg PA siRNA were significant with P=0.09, 0.02, and 0.003, respectively. The difference in virus titer in the lung homogenate between the group that received NP siRNA and PA+NP siRNAs had a P value of 0.2. Data for individual mice are presented in Table 13. These data indicate that siRNA targeted to the influenza NP and/or PA transcripts reduced the virus titer in the lung when administered following virus infection.

TABLE 13
Inhibition of influenza virus production in infected mice by siRNA

| | |
|---|---|
| Treatment | log₁₀TCID50 |

| | | | | |
|---|---|---|---|---|
| NT | 3.0 | 3.0 | 3.0 | 3.0 |
| GFP (60 μg) | 3.0 | 3.0 | 3.0 | 2.7 |
| PA (60 μg) | 2.7 | 2.7 | 2.3 | 1.3 |
| NP (60 μg) | 2.7 | 2.3 | 2.3 | 1.7 |
| NP + PA (60 μg each) | 2.3 | 2.0 | 1.7 | 1.3 |

### EXAMPLE 9

### Inhibition of Influenza Virus Production in Cells by Administration of a Lentivirus that Provides a Template for Production of shRNA

[0209] An oligonucleotide that serves as a template for synthesis of an NP-1496a shRNA was cloned between the U6 promoter and termination sequence of lentiviral vector pLL3.7 (Rubinson, D., et al., Nature Genetics 33:401-406, 2003). The oligonucleotide was inserted between the HpaI and XhoI restriction sites within the multiple cloning site of pLL3.7. This lentiviral vector also expresses EGFP for easy monitoring of transfected/infected cells. Lentivirus was produced by co-transfecting the DNA vector comprising a template for production of NP-1496a shRNA and packaging vectors into 293T cells. Forty-eight h later, culture supernatant containing lentivirus was collected, spun at 2000 rpm for 7 min at 4° C. and then filtered through a 0.45 um filter. Vero cells were seeded at 1×10⁵ per well in 24-well plates. After overnight culture, culture supernatants containing that contained the insert (either 0.25 ml or 1.0 ml) were added to wells in the presence of 8 ug/ml polybrene. The plates were then centrifuged at 2500 rpm, room temperature for 1 h and returned to culture. Twenty-four h after infection, the resulting Vero cell lines (Vero-NP-0.25, and Vero-NP-1.0) were analyzed for GFP expression by flow cytometry along with parental (non-infected) Vero cells. It is noted that NP-1496a differs from NP-1496 due to the inadvertent inclusion of an additional nucleotide (A) at the 3′ end of the sense portion and a complementary nucleotide (U) at the 5′ end of the antisense portion, resulting in a duplex portion that is 20 nt in length rather than 19 as in NP-1496. (See Table 2). According to other embodiments of the invention NP-1496 sequences rather than NP-1496a sequences are used. In addition, the loop portion of NP-1496a shRNA differs from that of NP-1496 shRNA.

[0210] Control Vero cells and Vero cells infected with lentivirus containing the insert (Vero-NP-0.25 and Vero-NP-1.0) were infected with PR8 virus at MOI of 0.04, 0.2 and 1. Influenza virus titers in the supernatants were determined by HA assay 48 hrs after infection as described above.

[0211] Lentivirus containing templates for production of NP-1496a shRNA were tested for ability to inhibit influenza virus production in Vero cells. The NP-1496a shRNA includes two complementary regions capable of forming a stem-loop structure containing a double-stranded portion that has the same sequence as the NP-1496a siRNA described above. Incubation of lentivirus-containing supernatants with Vero cells overnight resulted in expression of EGFP, indicating infection of Vero cells by lentivirus. The shaded curve represents mean fluorescence intensity in control cells (uninfected). When 1 ml of supernatant was used, almost all cells became EGFP positive and the mean fluorescence intensity was high (1818) (Vero-NP-1.0). When 0.25 ml of supernatant was used, most cells (˜95%) were EGFP positive and the mean fluorescence intensity was lower (503) (Vero-NP-0.25).

[0212] Parental Vero cells and lentivirus-infected Vero cells were then infected with influenza virus at MOI of 0.04, 0.2, and 0.1, and virus titers were assayed 48 hrs after influenza virus infection. With increasing MOI, the virus titers increased in the supernatants of parental Vero cell cultures. In contrast, the virus titers remained very low in supernatants of Vero-NP-1.0 cell cultures, indicating influenza virus production was inhibited in these cells. Similarly, influenza virus production in Vero-NP-0.25 cell cultures was also partially inhibited. The viral titers are presented in Table 14. These results suggest that NP-1496 shRNA expressed from lentivirus vectors can be processed into siRNA to inhibit influenza virus production in Vero cells. The extent of inhibition appears to be proportional to the extent of virus infection per cell (indicated by EGFP level).

TABLE 14
Inhibition of influenza virus production by siRNA
expressed in cells in tissue culture

| Cell Line | Viral Titer | | |
|---|---|---|---|
| Vero | 16 | 64 | 128 |
| Vero-NP-0.25 | 8 | 32 | 64 |
| Vero-NP-1.0 | 1 | 4 | 8 |

### EXAMPLE 10

### Inhibition of Influenza Production in Mice by Intranasal Administration of a DNA Vector from Which siRNA Precursors are Transcribed

[0213] Construction of a plasmid from which NP-1496a shRNA is expressed is described above. Oligonucleotides that serve as templates for synthesis of PB1-2257 shRNA or RSV-specific shRNA were cloned between the U6 promoter and termination sequence of lentiviral vector pLL3.7 as described above for NP-1496a shRNA. The sequences of the oligonucleotides were as follows:

(SEQ ID NO: 17192)

NP-1496a sense:
5′-
TGGATCTTATTTCTTCGGAGATTCAAGAGATCTCCGAAGAAATAAGATCC
TTTTTTC-3′

(SEQ ID NO: 17193)

NP-1496a antisense:
5′-
TCGAGAAAAAAGGATCTTATTTCTTCGGAGATCTCTTGAATCTCCGAAGA
AATAAGATCCA-3′

(SEQ ID NO: 17194)

PB1-2257 sense:
5′-
TGATCTGTTCCACCATTGAATTCAAGAGATTCAATGGTGGAACAGATCTT
TTTTC-3′

(SEQ ID NO: 17195)

PB1-2257 antisense:
5′-
TCGAGAAAAAAGATCTGTTCCACCATTGAATCTCTTGAATTCAATGGTGG
AACAGATCA-3′

(SEQ ID NO: 17196)

RSV sense:
5′-
TGCGATAATATAACTGCAAGATTCAAGAGATCTTGCAGTTATATTATCGT
TTTTTC-3′

(SEQ ID NO: 17197)

RSV antisense:
5′-
TCGAGAAAAAACGATAATATAACTGCAAGATCTCTTGAATCTTGCAGTTA
TATTATCGCA-3′

The RSV shRNA expressed from the vector comprising the above oligonucleotide is processed in vivo to generate an siRNA having sense and antisense strands with the following sequences:

(SEQ ID NO: 17198)

Sense:
5′-CGATAATATAACTGCAAGA-3′

(SEQ ID NO: 17199)

Antisense:
5′-TCTTGCAGTTATATTATCG-3′
A PA-specific hairpin may be similarly constructed
using the following oligonucleotides:

(SEQ ID NO: 17200)

PA-2087 sense:
5′-
TGCAATTGAGGAGTGCCTGATTCAAGAGATCAGGCACTCCTCAATTGCTT
TTTTC-3′

(SEQ ID NO: 17201)

PA-2087 antisense:
5′-
TCGAGAAAAAAGCAATTGAGGAGTGCCTGATCTCTTGAATCAGGCACTCC
TCAATTGCA-3′

[0214] Plasmid DNAs capable of serving as templates for expression of NP-1496a shRNA, PB1-2257 shRNA, or RSV-specific shRNA (60 μg each) were individually mixed with 40 μl Infasurf ® (ONY, Inc., Amherst N.Y.) and 20 μl of 5% glucose and were administered intranasally to groups of mice, 4 mice each group, as described above. A mixture of 40 μl Infasurf and 20 μl of 5% glucose was administered to mice in the no treatment (NT) group. The mice were intranasally infected with PR8 virus, 12000 pfu per mouse, 13 hours later, as described above. Lungs were harvested and viral titer determined 24 hours after infection.

[0215] The ability of shRNAs expressed from DNA vectors to inhibit influenza virus infection in mice was tested. For these experiments, plasmid DNA was mixed with Infasurf, a natural surfactant extract from calf lung similar to vehicles previously shown to promote gene transfer in the lung. The DNA/Infasurf mixtures were instilled into mice by dropping the mixture into the nose using a pipette. Mice were infected with PR8 virus, 12000 pfu per mouse, 13 hours later. Twenty-four hrs after influenza virus infection, lungs were harvested and virus titers were measured by MDCK/hemagglutinin assay.

[0216] Virus titers were high in mice that were not given any plasmid DNA or were given a DNA vector expressing a respiratory syncytial virus (RSV)-specific shRNA. Lower virus titers were observed when mice were given plasmid DNA that expresses either NP-1496a shRNA or PB1-2257 shRNA. The virus titers were more significantly decreased when mice were given both influenza-specific plasmid DNAs together, one expressing NP-1496a shRNA and the other expressing PB1-2257 shRNA.

[0217] The average log₁₀ TCID₅₀ of the lung homogenate for mice that received no treatment or received a plasmid encoding an RSV-specific shRNA was 4.0 or 4.1, respectively. In mice that received plasmid capable of serving as a template for NP-1496a shRNA, the average log₁₀ TCID₅₀ of the lung homogenate was 3.4. In mice that received plasmid capable of serving as a template for PB1-2257 shRNA, the average log₁₀ TCID₅₀ of the lung homogenate was 3.8. In mice that received plasmids capable of serving as templates for NP and PB shRNAs, the average log₁₀ TCID₅₀ of the lung homogenate was 3.2. The differences in virus titer in the lung homogenate between the group that received no treatment or RSV-specific shRNA plasmid and the groups that received NP shRNA plasmid, PB1 shRNA plasmid, or NP and PB1 shRNA plasmids had P values of 0.049, 0.124, and 0.004 respectively. Data for individual mice are presented in Table 15. These results show that shRNA expressed from DNA vectors can be processed into siRNA to inhibit influenza virus production in mice and demonstrate that Infasurf is a suitable vehicle for the delivery of plasmids from which shRNA can be expressed. In particular, these data indicate that shRNA targeted to the influenza NP and/or PB1 transcripts reduced the virus titer in the lung when administered following virus infection.

TABLE 15
Inhibition of influenza virus production by shRNA expressed in mice

| | |
|---|---|
| Treatment | log₁₀TCID50 |

| | | | | |
|---|---|---|---|---|
| NT | 4.3 | 4.0 | 4.0 | 4.3 |
| RSV (60 μg) | 4.3 | 4.0 | 4.0 | 4.0 |
| NP (60 μg) | 4.0 | 3.7 | 3.0 | 3.0 |
| PB1 (60 μg) | 4.0 | 4.0 | 3.7 | 3.3 |
| NP + PB1 (60 μg each) | 3.7 | 3.3 | 3.0 | 3.0 |

### EXAMPLE 11A

### Inhibition of Luciferase Activity in the Lung by Delivery of siRNA to the Vascular System or the Respiratory Tract

[0218] siRNAs were obtained from Dharmacon and were deprotected and annealed as described above. siRNA sequences for NP (NP-1496), PA (PA-2087), PB1 (PB1-2257), and GFP were as given above. Luc-specific siRNA was as described in (McCaffrey, A P, et al., Nature 418:38-39)

[0219] pCMV-luc DNA (Promega) was mixed with PEI (Qbiogene, Carlsbad, Calif.) at a nitrogen/phosphorus molar ratio (N/P ratio) of 10 at room temperature for 20 min. For i.v. administration, 200 μl of the mixture containing 60 μg of DNA was injected retroorbitally into 8 week old male C57BL/6 mice (Taconic Farms). For intratracheal (i.t.) administration, 50 μl of the mixture containing 30 μg or 60 μg of DNA was administered into the lungs of anesthetized mice using a Penn Century Model 1A-1C insufflator.

[0220] siRNA-PEI compositions were formed by mixing 60 μg of luc-specific or GFP-specific siRNA with jetPEI at an N/P ratio of 5 at room temperature for 20 min. For i.v. administration, 200 μl of the mixture containing the indicated amounts of siRNA was injected retroorbitally. For pulmonary administration, 50 μl was delivered intratracheally.

[0221] At various times after pCMV-luc DNA administration, lungs, spleen, liver, heart, and kidney were harvested and homogenized in Cell Lysis Buffer (Marker Gene Technologies, Eugene, Oreg.). Luminescence was analyzed with the Luciferase Assay System (Promega) and measured with an Optocomp®I luminometer (MGM Instruments, Hamden, Conn.). The protein concentrations in homogenates were measured by the BCA assay (Pierce).

[0222] To determine the tissue distribution of PEI-mediated nucleic acid delivery in mice, pCMV-luc DNA-PEI complexes were injected i.v., and 24 hr later, Luc activity was measured in various organs. Activity was highest in the lungs, where Luc activity was detected for at least 4 days, whereas in heart, liver, spleen, and kidney, levels were 100-1,000 times lower and were detected for a shorter time after injection. When DNA-PEI complexes were instilled i.t., significant Luc activity was also detected in the lungs, although at a lower level than after i.v. administration.

[0223] To test the ability of PEI to promote uptake of siRNAs by the lungs following i.v. administration, mice were first given pCMV-luc DNA-PEI complexes i.t., followed by i.v. injection of Luc-specific siRNA complexed with PEI, control GFP-specific siRNA complexed with PEI, or the same volume of 5% glucose. Twenty-four hours later, Luc activity in the lungs was 17-fold lower in mice that received Luc siRNA than in those given GFP siRNA or no treatment. Because Luc siRNA can inhibit Luc expression only in the same lung cells that were transfected with the DNA vector, these results indicate that i.v. injection of a siRNA-PEI mixture achieves effective inhibition of a target transcript in the lung.

[0224] To test the ability of PEI to promote uptake of siRNAs by the lungs following pulmonary administration, mice were first given pCMVDNA-PEI complexes i.v., followed immediately by i.t. administration of Luc-specific siRNA mixed with PEI, control GFP-specific siRNA mixed with PEI, or the same volume of 5% glucose. Twenty-four hours later, luciferase activities were assayed in lung homogenates. Luciferase activity was 6.8-fold lower in mice that were treated with luciferase siRNA than those treated with GFP siRNA. These results indicate that pulmonary administration of an siRNA-PEI mixture achieves effective inhibition of a target transcript in lung cells.

### EXAMPLE 11B

### Inhibition of Cyclophilin B in the Lung by Delivery of siRNA to the Respiratory System

[0225] Cyclophilin B is an endogenous gene that is widely expressed in mammals. To assess the ability of siRNA delivered directly to the respiratory system to inhibit expression of an endogenous gene, outbred Blackswiss mice (around 30 g or more body weight) were anesthetized by isofluorane/oxygen, and siRNA targeted to cyclophilin B (Dharmacon, D-001136-01-20 siCONTROL Cyclophilin B siRNA (Human/Mouse/Rat) or control GFP-949 siRNA (2 mg/kg) was administered intranasally to groups of 2 mice for each siRNA. Lungs were harvested 24 hours after administration. RNA was extracted from the lung and reverse transcription was done using a random primer. Real time PCR was then performed using cyclophilin B and GAPDH Taqman gene expression assay (Applied Biosystems). Results (Table 16-1) showed 70% silencing of cyclophilin B by siRNA targeted to cyclophilin B.

TABLE 16-1
Inhibition of Cyclophilin B in the Lung

| Average | Normalized | Ave normal | silencing % |
|---|---|---|---|
| PBS-1 | 5.395406 | 4.288984 | |
| PBS-2 | 3.182562 | | |
| GFP-1 | 2.547352 | 3.752446 | 12.50968 |
| GFP-2 | 4.957539 | | |
| Cyclo-1 | 1.173444 | 1.256672 | 70.7 |
| Cyclo-2 | 1.339901 | | |

TABLE 16-2

Target Portions in NP Gene

| | | |
|---|---|---|
| ID | | Nucleo- |
| Num- | | tide |
| ber | Sequence | Position |

| | | | |
|---|---|---|---|
| 1 | agcaaaagcaggguagaua | (SEQ ID NO: 17202) | 1-19 |
| 2 | gcaaaagcaggguagauaa | (SEQ ID NO: 17203) | 2-20 |
| 3 | caaaagcaggguagauaau | (SEQ ID NO: 17204) | 3-21 |
| 4 | aaaagcaggguagauaauc | (SEQ ID NO: 17205) | 4-22 |
| 5 | aaagcaggguagauaauca | (SEQ ID NO: 17206) | 5-23 |
| 6 | aagcaggguagauaaucac | (SEQ ID NO: 17207) | 6-24 |

### EXAMPLE 12

### Inhibition of Influenza Virus by Direct Delivery of Naked siRNA to the Respiratory System

[0226] siRNA preparation, viral infection, lung harvests, and influenza virus titer assays were performed as described above. Mice were anesthetized using isofluorane (administered by inhalation). siRNA was delivered in a volume of 50 μl by intranasal drip. p values were computed using Student's T test.

[0227] siRNA (NP-1496) in phosphate buffered saline (PBS) was administered to groups of mice (5 mice per group). Mice were infected with influenza virus (2000 PFU) 3 hours after siRNA administration. Lungs were harvested 24 hours post-infection and virus titer measured. In a preliminary experiment mice were anesthetized with avertin and 2 mg/kg siRNA was administered by intranasal drip. A reduction in virus titer relative to controls was observed, although it did not reach statistical significance (data not shown). In a second experiment, Black Swiss mice were anesthetized using isofluorane/O₂. Various amounts of siRNA in PBS was intranasally administered into the mice., 50 ul each mouse. Three different groups (5 mice per group) received doses of 2 mg/kg, 4 mg/kg, or 10 mg/kg siRNA in PBS by intranasal drip. A fourth group that received PBS alone served as a control. Three hours later, the mice were anesthetized again using isofluorane/O₂, 30 ul of PR8 virus (2000 pfu=4× lethal dose) was intranasally administered into the mice. 24 h after infection, the mouse lungs were harvested, homogenized and virus titer was measured by evaluation of the TCID₅₀ as described above. Serial 5-fold dilutions of the lung homogenate were performed rather than 10-fold dilutions.

[0228] A significant and dose-dependent difference in virus titer was seen between mice in each of the three treated groups and the controls (Table 17). The reduction in virus titer relative to controls was 3.45-fold (p=0.0125), 4.16-fold (p=0.0063), and 4.62-fold (p=0.0057) in the groups that received doses of 2 mg/kg, 4 mg/kg, and 10 mg/kg respectively.

[0229] In summary, these results demonstrate the efficacy of siRNA delivered to the respiratory system in an aqueous medium in the absence of specific agents to enhance delivery.

TABLE 17
Intranasal Delivery of Naked siRNA Inhibits Influenza Virus Production

| Treatment | log₁₀TCID50 | | | | | Average | P value |
|---|---|---|---|---|---|---|---|
| PBS | 26718.37 | 45687.78 | 45687.78 | 15625 | 26718.37 | 32087.46 | |
| NP (2 mg/kg) | 15625 | 15625 | 3125 | 3125 | 9137.56 | 9327.51 | 0.008 |
| NP (4 mg/kg) | 9137.56 | 9137.56 | 5343.68 | 9137.56 | 5343.68 | 7620 | 0.004 |
| NP (10 mg/kg) | 9137.56 | 9137.56 | 9137.56 | 3125 | 3125 | 6732.53 | 0.003 |

### EXAMPLE 13

### Inhibition of Influenza Virus Production in Mice by Direct Delivery of Naked siRNA to the Respiratory System

[0230] This example confirms results above and demonstrates inhibition of influenza virus production in the lung by administration of siRNA targeted to NP to the respiratory system in an aqueous medium in the absence of delivery-enhancing agents. Six μg, 15 ug, 30 μg, and 60 μg of NP-1496 siRNAs or 60 μg of GFP-949 siRNAs in PBS were intranasally instilled into mice essentially as described above, except that mice were intranasally infected with PR8 virus, 1000 pfu per mouse, two hours after siRNA delivery. Lungs were harvested 24 hours after infection. NP-specific siRNA was effective for the inhibition of influenza virus when administered by intranasal installation in an aqueous medium in the absence of delivery agents. A significant and dose-dependent difference in virus titer was seen between mice in each of the three treated groups and the controls (Table 18).

TABLE 18
Inhibition of Influenza Virus Production in the Lung Using Naked siRNA

| Treatment | TCID50 | | | | | Average | P value |
|---|---|---|---|---|---|---|---|
| PBS | 125 | 365.5 | 213.7 | 365.5 | 125 | 239.95 | |
| GFP (60 μg) | 125 | 213.7 | 213.7 | 213.7 | 365.5 | 226.32 | |
| NP (6 μg) | 213.7 | 213.7 | 125 | 213.7 | 42.7 | 161.8 | 0.263 |
| NP (15 μg) | 125 | 125 | 42.7 | 25 | 73.1 | 78.17 | 0.024 |
| NP (30 μg) | 8.5 | 125 | 42.7 | 125 | 14.6 | 63.18 | 0.019 |
| NP (60 μg) | 73.1 | 14.6 | 25 | 25 | 25 | 32.54 | 0.006 |

### EXAMPLE 14

### Modified siRNAs Mediate Effective Silencing

[0231] To explore the silencing potential of siRNAs containing modified nucleotides, NP-1496 siRNA containing sense and antisense strands with 2′-O-methyl modifications at alternate ribonucleotides in each strand were synthesized and tested in comparison with unmodified NP-1496 siRNA. The 2′-O-methyl modified NP1496 siRNA sequences were as follows: (2′-O-methyl shown as “m” in front of the modified nucleotide):

[0232] Sense: 5′-GmGA mUCmU UmAU mUUmC UmUC mGGmA G dTdT-3′ (SEQ ID NO: 17208)

[0233] Antisense: 5′-mCUmC CmGA mAGmA AmAU mAAmG AmUC mC dTdT-3′ (SEQ ID NO: 17209)

[0234] The 2′-O-methyl modified NP1496 siRNA and unmodified NP1496 siRNA were transfected into Vero cells in 24-well plate using lipofectamine 2000 (Invitrogen) following the manufacturer's instructions. 6 hours after transfection, the culture media was aspirated. The cells were inoculated with 200 μl of PR8 virus at MOI of 0.1. The culture supernatant was collected at 24, 36 and 48 hours after infection. Virus titer was determined as described above. The 2′-O-methyl modified NP1496 showed slightly more inhibition of virus growth than unmodified NP1496. Results are shown in Table 19.

TABLE 19
Effective Inhibition of Influenza Virus
Production Using Modified siRNA

| HA units | 24 h | 36 h | 48 h |
|---|---|---|---|
| No siRNA control | 4 | 8 | 16 |
| Unmodified NP1496 (400 uM) | 1 | 2 | 8 |
| Modified NP1496 (100 uM) | 1 | 2 | 8 |
| Modified NP1496 (200 uM) | 1 | 2 | 4 |
| Modified NP1496 (400 uM) | 1 | 1 | 4 |

### EXAMPLE 15

### Inhibition of Influenza Virus by Oraltracheal Delivery of Naked siRNA to the Respiratory System

[0235] siRNA preparation, viral infection, lung harvests, and influenza virus titer assays were performed as described above. Mice were anesthetized using avertin (administered by intraperitoneal injection). 1 mg/kg siRNA was delivered in a volume of 175 μl by oraltracheal injection.

[0236] siRNA (NP-1496), 1 mg/kg, and 30 ul Infasurf in 5% glucose was administered to groups of mice (5 mice per group). Mice were infected with influenza virus (2000 PFU) 3 hours after siRNA administration. Lungs were harvested 24 hours post-infection and virus titer measured.

[0237] In a second experiment, Black Swiss mice were anesthetized using intraperitoneally administered avertin. NP-1496 siRNA and GFP-949 siRNA in PBS was intratracheally administered into the mice, 50 μl each mouse. A third group that received PBS alone served as a control. Three hours later, the mice were anesthetized again using isofluorane/O₂, 30 ul of PR8 virus (2000 pfu=4× lethal dose) was intranasally administered into the mice. Twenty-four hours after infection, the mouse lungs were harvested, homogenized and virus titer was measured by evaluation of the TCID₅₀ as described above. Serial 5-fold dilutions of the lung homogenate were performed rather than 10-fold dilutions.

[0238] In summary, these results demonstrate the efficacy of siRNA delivered to the respiratory system in an aqueous medium in the absence of specific agents to enhance delivery.

### EXAMPLE 16

### Nucleotide Mutation Tolerance Studies to Select siRNAs That Target a Broad Spectrum of Influenza Viruses

[0239] This example demonstrates that siRNAs whose antisense strands are less than 100% complementary to the targeted transcript within the inhibitory region (e.g., within the 19 base pair region that is complementary to the target transcript) mediate effective silencing. The results demonstrate that the RNAi agents described herein will effectively inhibit a wide range of influenza strains whose sequences vary from that of PR8 within the target portion.

[0240] A dual luciferase assay was used to evaluate the ability of siRNAs to inhibit expression of influenza genes that are not 100% complementary to the antisense strand of the siRNA within the 19 nucleotide inhibitory region. Mismatches derived from the alignment of human and avian influenza virus strains (using PR8 as standards) were introduced into the DNA vector (psiCHECK) using a site-directed mutagenesis kit (Stratagene), i.e., the influenza target site was modified to include either 1 or 2 differences relative to the PR8 sequence, with the specific differences corresponding to differences found in one or more of the human or avian influenza strains.

[0241] Table 20 shows results of an experiment demonstrating that variations in the viral NP target (target for NP-1496) do not substantially reduce RNAi activity. (The data shown is the average of triplicates). Mismatches at positions near the 5′ or 3′ end of the antisense strand, or near the middle, were tested.

TABLE 20
Effect of mismatches between antisense strand and target
region on silencing by NP-1496

| | | A3 to | T9 to | C12 to | C15 to | A18 to |
|---|---|---|---|---|---|---|
| | Original | G3 | C9 | T12 | T15 | G18 |
| Renilla luciferase | 85.6 | 81.8 | 58.3 | 67.8 | 72.9 | 54.7 |
| silencing (%) | | | | | | |
| Remaining silencing | 100 | 91.3 | 65.1 | 75.7 | 81.4 | 61.1 |
| comparing with | | | | | | |
| original (%) | | | | | | |

[0242] Variations in the viral PA target (target for PA-2087 or PA-8282) do not substantially reduce RNAi activity. However, G18 to A18 mutations found in 7 among 157 human influenza strains did substantially affect the RNA interference activity. Mismatches at positions near the 5′ or 3′ end of the antisense strand, or near the middle, were tested. The presence of two mismatches between the antisense strand inhibitory region and the target reduced the silencing by about 70-75%, but a useful degree of silencing was still observed (Table 21).

TABLE 21
Effect of mismatches between antisense strand and target region
on silencing by PA-2087 or PA-8242

| | | | | | | | | T6 to C6 |
|---|---|---|---|---|---|---|---|---|
| | | A4 to | T6 to | T6 to | C15 to | G18 to | A19 to | and C15 to |
| | Original | G4 | A6 | C6 | T15 | A18 | G19 | T15 |
| Renilla luciferase | 91.7 | 80.8 | 75.9 | 88.8 | 87.5 | 7.0 | 89.3 | 26.8 |
| silencing (%) | | | | | | | | |
| Remaining | 100 | 88.1 | 82.8 | 96.9 | 95.5 | 7.6 | 97.4 | 29.3 |
| silencing | | | | | | | | |
| comparing with | | | | | | | | |
| original (%) | | | | | | | | |

[0243] Table 22 shows results of an experiment demonstrating that variations in the viral PB2 target (target for PB2-3817) do not substantially reduce RNAi activity. (The data shown is the average of triplicates).

TABLE 22
Effect of mismatches between antisense strand and target region
on silencing by PB2-3817

| | Original | A17 to G17 | A18 to T18 |
|---|---|---|---|
| Renilla luciferase | 86.7 | 73.4 | 75.8 |
| silencing (%) | | | |
| Remaining silencing | 100 | 100 | 87.4 |
| comparing with | | | |
| original (%) | | | |

[0244] Table 23 shows results of an experiment demonstrating that variations in the viral PB1 target (target for PB1-6124) do not substantially reduce RNAi activity. (The data shown is the average of triplicates). Mismatches at positions near the 5′ or 3′ end of the antisense strand, or near the middle, were tested. The presence of two mismatches between the antisense strand inhibitory region and the target reduced the silencing by about 70-75%, but a useful degree of silencing was still observed.

TABLE 23
Effect of mismatches between antisense strand and target
region on silencing by PB1-6124

| | | | | | | A1 to T1 |
|---|---|---|---|---|---|---|
| PB1 (Lab ID# | | C15 to | A1 to | T2 to | G3 to | and G3 to |
| 6124 siRNA) | Original | T15 | G1 | C2 | A3 | A3 |
| Ranilla luciferase | 84.1 | 71.8 | 82.8 | 84.5 | 74.9 | 73.9 |
| silencing (%) | | | | | | |
| Remaining silencing | 100 | 85.4 | 98.5 | 100 | 89.1 | 87.9 |
| comparing with | | | | | | |
| original (%) | | | | | | |

Effect of mismatches between antisense strand and target
region on silencing by PB1-6129

| | | | | | | T3 to C3 |
|---|---|---|---|---|---|---|
| PB1 (Lab ID# | | T3 to | T7 to | T2 to | C10 to | and C10 |
| 6129 siRNA) | Original | C3 | C7 | C2 | T10 | to T10 |
| Ranilla luciferase | 86.4 | 87.3 | 84.4 | 84.5 | 81.3 | 59.0 |
| silencing (%) | | | | | | |
| Remaining silencing | 100 | 100 | 97.8 | 100 | 94.2 | 68.3 |
| comparing with | | | | | | |
| original (%) | | | | | | |

[0245] In addition to the results shown in the tables above, the present example also demonstrates that ten exemplary siRNAs duplexes of the present invention tolerate mismatches between the nucleotide sequence of the anti-sense strand of the siRNA and the nucleotide sequence of the targeted regions of viral transcripts. In the instant example, the capacity of the 21 previously identified siRNA to tolerate target sequence mutations was determined. To accomplish this, the target sites of all human and avian influenza gene sequences (available at www.lan1.flu.gov) were aligned using the PR8 strain as a reference. Single nucleotide polymorphism (SNPs) were identified and introduced into the dual-luciferase reporter construct using site-directed mutagenesis. Expression vectors containing the control target sequence (PR8) or the variants were subsequently transfected into Vero cells along with the 50 nM of the appropriate targeting siRNAs to determine the sensitivity of each siRNA to tolerate nucleotide mismatches.

[0246] Of the 21 siRNAs, ten siRNAs exhibited high degrees of silencing (% silencing) and were highly tolerant of target site polymorphisms. Table 24 summarizes the percent silencing data for the ten siRNAs (INFsi-1 through INFsi-8 and G1499 and G4276). The nucleotide sequence for each siRNA is shown and the nucleotides that were the target for site-directed mutagenesis are bolded and underlined. The “Mismatch” column illustrates the original nucleotide and its position, shown in parenthesis, within the siRNA along with the nucleotide that was substituted for the original nucleotide (mutated nucleotide). The percent silencing is presented as percentage of silencing observed with the native (PR8) silencing. Therefore, 100% relative silencing indicates that the mismatch had no effect on the functionality of the siRNA compared to its ability to silence the exact match target sequence (PR8). Any decrease in the percent relative silencing represents the degree of sensitivity of the siRNA for that mismatch in the target sequence (i.e., a lower percentage equates to a decrease in the functionality of the siRNA; “functionality” defined in this context as the ability of the siRNA to degrade it target RNA).

TABLE 24

Sensitivity of siRNAs to Naturally Occurring
Target Site Point Mutations

| | |
|---|---|
| Mismatch | Rela- |

| | | Original | Mutated | tive |
|---|---|---|---|---|
| | | Nucleo- | Nucleo- | % Si- |
| | siRNA Nucleotide | tide | tide | lenc- |
| siRNA | Sequence* | (Position) | (Position) | ing |
| G3789 | CGGGACTCTAGCATACTTA | G(3) | A(3) | 100% |
| (INFsi- | (SEQ ID NO: 17210) | G(4) | A(4) | 100% |
| 1) | | C(8) | T(8) | 72.4% |
| | | T(9) | C(9) | 50.1% |
| | | A(15) | G(15) | 81.9% |
| | | C(16) | G(16) | 0 |
| | | T(18) | G(18) | 74.2% |
| G3807 | ACTGACAGCCAGACAGCGA | C(2) | A(2) | 100% |
| (INFsi- | (SEQ ID NO: 17211) | C(6) | T(6) | 91.8% |
| 2) | | C(9) | T(9) | 50.7% |
| | | A(15) + | G(15) + | 41.5% |
| | | G(16) | A(16) | |
| G3817 | AGACAGCGACCAAAAGAAT | A(17) | G(17) | 100% |
| (INFsi- | (SEQ ID NO: 17212) | A(18) | T(18) | 87% |
| 3) | | A(18) | C(18) | 80.5% |
| | | T(19) | C(19) | 95.7% |
| | | T(19) | A(19) | 100% |
| G6124 | ATGAAGATCTGTTCCACCA | A(1) | T(1) | 100% |
| (INFsi- | (SEQ ID NO: 17213) | A(1) | G(1) | 98.5% |
| 4) | | T(2) | C(2) | 100% |
| | | G(3) | A(3) | 89.1% |
| | | A(5) | G(5) | 94.7% |
| | | T(8) | C(8) | 77% |
| | | T(12) | C(12) | 100% |
| | | C(15) | T(15) | 85.4% |
| | | A(1) + | T(1) + | 87.9% |
| | | G(3) | A(3) | |
| | | T(8) + | C(8) + | 32.2% |
| | | C(15) | T(15) | |
| G6129 | GATCTGTTCCACCATTGAA | T(3) | C(3) | 100% |
| (INFsi- | (SEQ ID NO: 17214) | T(7) | C(7) | 97.8% |
| 5) | | C(10) | T(10) | 94.2% |
| | | T(3) + | C(3) + | 68.3% |
| | | C(10) | T(10) | |
| G8282 | GCAATTGAGGAGTGCCTGA | A(4) | G(4) | 88.1% |
| (INFsi- | (SEQ ID NO: 17215) | T(6) | A(6) | 82.8% |
| 6) | | T(6) | C(6) | 96.9% |
| | | C(15) | T(15) | 95.5% |
| | | G(18) | A(18) | 7.6% |
| | | A(19) | G(19) | 97.4% |
| | | T(6) + | C(6) + | 29.3% |
| | | C(15) | T(15) | |
| G8286 | TTGAGGAGTGCCTGATTAA | T(2) | C(2) | 100% |
| (INFsi- | (SEQ ID NO: 17216) | T(2) | A(2) | 100% |
| 7) | | G(8) | A(8) | 100% |
| | | C(11) | T(11) | 100% |
| | | G(14) | A(14) | 85.2% |
| | | A(15) | G(15) | 95.4% |
| G1498 | GGATCTTATTTCTTCGGAG | A(3) | G(3) | 95.7% |
| (INFsi- | (SEQ ID NO: 17217) | T(9) | C(9) | 86.5% |
| 8) | | C(12) | T(12) | 85.4% |
| | | C(15) | T(15) | 91.7% |
| | | A(18) | G(18) | 94.4% |
| G1499 | GATCTTATTTCTTCGGAGA | A(2) | G(2) | 63.6% |
| | (SEQ ID NO: 17218) | T(8) | C(8) | 27.5% |
| | | C(11) | T(11) | 38.3% |
| | | C(14) | T(14) | 36.8% |
| | | A(17) | G(17) | 33.2% |
| G4276 | ACCTATGACTGGACTCTAA | C(3) | A(3) | 100% |
| | (SEQ ID NO: 17819) | C(3) | T(3) | 99.5% |
| | | A(5) | T(5) | 95.1% |
| | | T(6) | C(6) | 99% |
| | | C(9) | T(9) | 89.5% |
| | | T(15) | C(15) | 88.1% |
| | | T(15) | G(15) | 57.4% |
| | | T(15) | A(15) | 40.8% |
| | | C(16) | T(16) | 47.5% |
| | | A(18) | G(18) | 82.2% |
| | | C(9) + | T(9) + | 17.4% |
| | | T(15) | A(15) | |
| | | C(16) + | T(16) + | 28.4% |
| | | A(18) | G(18) | |
| | | T(15) + | G(15) + | 4.9% |
| | | C(16) + | T(16) + | |
| | | A(18) | G(18) | |
| | | T(15) + | A(15) + | 10.3% |
| | | C(16) + | T(16) + | |
| | | A(18) | G(18) | |
| | | C(3) + | T(3) + | 7.6% |
| | | A(5) + | T(5) + | |
| | | T(6) + | C(6) + | |
| | | C(9) + | T(9) + | |
| | | A(18) | G(18) | |

[0247] As shown in Table 24, only 19 of the 70 avian/human targets containing SNPs disrupted siRNA functionality by more than 30%. Two of these mutants, INFsi-2 have changes at position 9 (Mutation-9 for siRNA INFsi-2 and Mutation-4 for siRNA INFsi-1), which is adjacent to the RISC mediated cleavage site and predicted to be particularly sensitive to base pair mismatches. Surprisingly, three of the four variants containing two target site polymorphisms showed significant reductions in the levels of target cleavage (e.g. siRNA INFsi-4). None of the variants carrying the individual polymorphisms significantly impeded siRNA functionality.

[0248] These data show that ten siRNAs exhibited broad targeting properties against the majority of human and avian influenza virus strains demonstrating that these ten siRNAs have great potential as a multi-gene targeting strategy for effective RNAi therapeutics.

### EXAMPLE 17

### Intravenous Delivery of siRNA Inhibits Influenza Virus Production In Vivo

[0249] The present example demonstrates that both the prophylactic and post-infection intravenous administration of siRNA targeted to viral NP transcripts significantly inhibited influenza virus replication in the mouse (FIG. 1). The following is a list of exemplary human influenza virus conserved target sequence (derived from Accession No. AF389119):

| | |
|---|---|
| gccacugaaaucagagcau, | (SEQ ID NO: 17220) |
| ucagagcauccgucggaaa, | (SEQ ID NO: 17221) |
| ggacgauucuacauccaaa, | (SEQ ID NO: 17222) |
| cagcuuaacaauagagaga, | (SEQ ID NO: 17223) |
| gcuuaacaauagagagaau, | (SEQ ID NO: 17224) |
| aauagagagaauggugcuc, | (SEQ ID NO: 17225) |
| gggaaagauccuaagaaaa, | (SEQ ID NO: 17226) |
| ggaaagauccuaagaaaac, | (SEQ ID NO: 17227) |
| ugagagaacucauccuuua, | (SEQ ID NO: 17228) |
| uuaugacaaagaagaaaua, | (SEQ ID NO: 17229) |
| acaagaauugcuuaugaaa, | (SEQ ID NO: 17230) |
| gaauugcuuaugaaagaau, | (SEQ ID NO: 17231) |
| aagcaaugauggaucaagu, | (SEQ ID NO: 17232) |
| gcaaugauggaucaaguga, | (SEQ ID NO: 17233) |
| ugauggaucaagugagaga, | (SEQ ID NO: 17234) |
| ccacuagaggaguucaaau, | (SEQ ID NO: 17235) |
| cacuagaggaguucaaauu, | (SEQ ID NO: 17236) |
| gaggaaacaccaaucaaca, | (SEQ ID NO: 17237) |
| ggaaacaccaaucaacaga, | (SEQ ID NO: 17238) |
| gggccaaaucagcauacaa, | (SEQ ID NO: 17239) |
| caaccauuauggcagcauu, | (SEQ ID NO: 17240) |
| ccauuauggcagcauucaa, | (SEQ ID NO: 17241) |
| aggaugauggaaagugcaa, | (SEQ ID NO: 17242) |
| gaugauggaaagugcaaga, | (SEQ ID NO: 17243) |
| gaguaaugaaggaucuuau, | (SEQ ID NO: 17244) |
| ggaucuuauuucuucggag, | (SEQ ID NO: 17245) |
| gaucuuauuucuucggaga, | (SEQ ID NO: 17246) |
| ucuuauuucuucggagaca, | (SEQ ID NO: 17247) |
| ggaguacgacaauuaaaga, | (SEQ ID NO: 17248) |

[0250] The following is a list of sequences that represent a fragment of the influenza NP gene for multiple species. The bolded region is a conserved region shared among these sequences.

| | Nucleotide Sequence of | SEQ |
|---|---|---|
| Influenza Strain, | Conserved Region of Influenza NP Gene, | ID NO |
| PR8 (H1N1), | AATGAAGGATCTTATTTCTTCGGAGACAATGCAGAGGAGTACGACAATTA, | 17249 |
| WSN (H1N1), | AATGAAGGATCTTATTTCTTCGGAGACAATGCAGAGGAGTACGACAATTA, | 17250 |
| Lenn.(H2N2), | AATGAAGGATCTTATTTCTTCGGAGACAATGCAGAGGAGTACGACAATTA, | 17251 |
| HK (H3N2), | AATGAAGGATCTTATTTCTTCGGAGACAATGCAGAGGAGTACGACAATTA, | 17252 |
| Memphis (H3N2), | AATGAAGGATCTTATTTCTTCGGAGACAATGCAGAGGAGTACGACAATTA, | 17253 |
| HK (H5N1), | AATGAAGGATCTTATTTCTTCGGAGACAATGCAGAGGAATATGACAATTG, | 17254 |
| Duck (H10N7), | AACGAGGGATCTTATTTCTTCGGAGACAATGCAGAGGAATATGACAATTA, | 17255 |
| Equine (H7N7), | AATGAAGGGTCTTATTTCTTCGGAGACAATGCTGAGGAGTTTGACAGTTA, | 17256 |
| Whale (H13N2), | AATGAGGGATCTTATTTCTTCGGAGACAATGCTGAGGAGTATGACAATTG, | 17257 |
| Chicken(H9N2), | AATGAAGGATCTTATTTCTTCGGAGACAATGCATAGGAGTATGACAATTA, | 17258 |
| Swine (H4N6), | AACGAAGGGTCTTATTTCTTCGGAGACAATGCAGAGGAATATGACAATTA, | 17259 |

[0251] To test the prophylactic use of viral targeting siRNA, NP-1496 (INFsi-9) was mixed with the cationic delivery polymer jetPEI (Qbiogene) and administered (2 mg/Kg) to C57BL/6 mice intravenously (IV). Three hours later, mice were inoculated (intranasally) with 1×10⁴ PR8 viral particles to initiate infection and later sacrificed 24 hrs post-infection to assay lung homogenates for viral titers using the MDCK hemagglutinin assay.

[0252] The average log₁₀ TCID₅₀ of the lung homogenate for mice that received no siRNA treatment or received a siRNA targeted to GFP was 4.2. In mice that were pretreated with 30 μg siRNA targeted to NP and jetPEI, the average log₁₀ TCID₅₀ of the lung homogenate was 3.9. In mice that were pretreated with 60 μg siRNA targeted to NP and jetPEI, the average log₁₀ TCID₅₀ of the lung homogenate was 3.2. The difference in virus titer in the lung homogenate between the group that received no treatment and the group that received 60 μg NP siRNA was significant with P=0.0002.

[0253] In order to evaluate siRNA as a therapeutic treatment for an existing influenza infection, mice were infected with PR8 virus intranasally and five hours later were given NP-1496/jetPEI or PA-2087/jetPEI mixture intravenously. Viral titers in the lungs were assayed by MDCK-HA assay 28 hours post-infection. All treatments significantly reduced viral titer in comparison to untreated, infected mice; dose-responsive decreases in viral titers were observed in mice treated with NP-1496 (FIG. 1). A suppression effect of siRNA treatment at 24 hours post-infection was also seen in mice.

[0254] Further, the designed siRNAs can also protect mice from a lethal challenge of avian influenza virus. Mice injected (2×) with control (GFP-targeting) siRNAs and subsequently challenged with a lethal dose of H1N1 (PR8), H5N1 or H7N7 virus, continuously lost weight and succumbed to the infection between days 7-10, as shown in FIG. 2. However, infected mice that received the combined siRNAs NP-1496 and PA-2087 recovered from the initial weight loss. At least 50% of the mice survived the lethal H7N7 challenge, 87% survived the lethal H5N1 challenge and 100% survived the H1N1 challenge. Thus, siRNAs specific for the conserved regions of the influenza viral genome confers broad protection, including protection against the highly pathogenic avian influenza viruses (FIG. 2).

### EXAMPLE 18A

### Intranasal Delivery of siRNA Inhibits Influenza Production in Mice

[0255] The present example demonstrates that prophylactic intranasal administration of siRNA targeted to viral NP transcripts inhibited influenza virus replication and reduced viral RNA levels in a dose-dependent manner in the mouse.

[0256] Influenza normally infects and replicates in the upper respiratory tract and lungs. Therefore, due to accessibility, topical administration, i.e. intranasal and/or pulmonary delivery of drug should be ideal for influenza prophylaxis and therapy. Specifically, intranasal and/or pulmonary delivery of siRNAs is advantageous in treating influenza virus infection, because, 1) high local siRNA concentration are easily achieved when local delivery route is used and thus less siRNA is required compared to systemic delivery and 2) intranasal and/or pulmonary delivery methods are non-invasive. Thus, an intranasal delivery of siRNA in the influenza mouse model was pursued.

[0257] Unlike conventional intravenous delivery of naked siRNA which resulted in negligible silencing effect, intranasally administered siRNA (unmodified, in PBS or saline) can be detected in the lungs and is able to silence endogenous gene expression or inhibit virus production in lung tissue. To test the efficacy of non-invasive delivery of influenza targeting siRNA, the NP-1496 siRNA (in PBS) was delivered intranasally. BALB/c mice were treated intranasally with indicated amounts of NP specific siRNA in PBS or PBS control. Two hours later, all mice were infected intranasally (1000 pfu/mouse) with the PR8 serotype. The lungs were harvested 24 hours post-infection and viral titer was measured from lung homogenates by MDCK-HA assay. P values between PBS and siRNA groups indicated statistical significance with 0.5, 1 and 2 mg/kg siRNA treated groups. The data is shown in FIG. 3.

[0258] In the absence of a carrier, naked NP targeting siRNA was effective in suppressing viral production in the mouse lung (FIG. 3; 24 hours post-infection). Suppression was dose dependent, with a 7-fold reduction being observed when 2 mg/kg of siRNA was delivered two hours prior to infection.

[0259] The effects of intranasal delivery of NP-targeting siRNA were also investigated at higher concentrations (10 mg/kg, delivered 3 hours prior to infection) using target mRNA expression (quantitative RT-PCR) and viral titer (MDCK-HA) to measure efficacy. BALB/c mice were administered control and NP-targeting siRNA intranasally (10 mg/kg, in PBS). Three hours later, all the mice were infected intranassally with PR8 virus (50 pfu/mouse). The lungs were harvested at 24 and 48 hours post-infection and total RNA was isolated from the left lung. Total mRNA was reverse transcribed to cDNA using dT18 primers. Real time PCR was carried out using PB1 specific primers to quantify viral mRNA levels. GAPDH was used as an internal control. The right and middle lungs were homogenized and the viral titer was measured by MDCK-HA assay. The virus titer in the samples at 48 hours post-infection is shown in the FIG. 6 statistic significance was found between PBS and NP siRNA treated group using student t test (p=0.01); the titer in the samples 24 hours post-infection was too low to detect, possibly due to siRNA directed suppression.

[0260] The results are shown in FIG. 4, which compares the normalized quantitative PCR results and the viral titer assay results. Viral mRNA level measured at 24 hours post-infection show a 55.2% inhibition but by 48 hours post-infection only minimal inhibition was observed. In contrast, the MDCK-HA assay of mouse lung samples indicated 84.6% viral titer suppression on day 2. Compared to the MDCK-HA assay that measures live virus particles, viral mRNA quantification is probably more sensitive in reflecting the early changes in viral replication. Thus, the decrease in viral mRNA suppression on day 2 is probably due to the decreased RNAi effect in the mouse lung by that time.

[0261] Also, the effect on influenza viral titer in mouse between naked siRNA targeting the NP transcript delivered intranasally and the influenza treatment, Tamiflu, was compared. Relative to the level of viral titer observed with the GPF control siRNA, both the intranasally delivered naked siRNA and Tamiflu treatments reduced influenza viral titers.

[0262] The effect on viral titer by NP-viral transcript targeting in mouse after intranasal delivery the siRNA G1498 (INFsi-8) was also addressed. The G1498 siRNA exhibited significant ability to reduce viral titers in vitro and thus was chosen for further characterization in vivo. The control for this study was an unmodified siRNA targeted against luciferase (Dharmacon; Luc). Ten week old female BALB/c (Taconic) mice with a weight range of 18-22 grams were used in the study. There were ten mice per study group. The mice were dosed with G1498 siRNA in PBS at 2 mg/kg, 5 mg/kg, 10 mg/kg, 20 mg/kg and 30 mg/kg. The control groups were dosed the same, except no controls received a 2 mg/kg dose. Both the G1498 and Luc siRNA control groups were infected with PR8 influcenze virus at 30 pfu in 30 μl in PBS four hours post-siRNA administration. Forty-eights hours post-infection, the mouse lungs were harvested and viral titers measured therefrom in MDCK cells with a TCID₅₀ assay.

[0263] The results are shown in FIG. 5. The results of the TCID₅₀ assay show that the G1498 siRNA at 2 mg/kg suppressed influenza production in the mouse lung by 86%, at 5 mg/kg and 10 mg/kg by 90.6%, at 20 mg/kg by 96.6% and at 30 mg/kg by 95.2%. In relation to PBS alone or the Luc control siRNA study groups, the mice administered the G1498 siRNA intranasally, as a whole, showed significant differences (P<0.001). The mice that received PBS did not exhibit significant difference compared to the mice group that received the Luc siRNA, as a whole, (P>0.05). Each study group that received a dose of the G1498 siRNA significantly differed from the PBS group or Luc siRNA control study group at 30 mg/kg (P<0.05). Finally, no significant dose response was observed with mice that received the range of G1498 siRNA doses.

### EXAMPLE 18B

### Intranasal Delivery of siRNA Inhibits Cyclophilin B Expression in a Non-Influenza Mouse Model

[0264] The present example demonstrates that the airway cell uptake of naked siRNA via intranasal administration is not a specific phenomenon of influenza-infected cells. In addition, naked siRNA delivered intranasally also reduced endogenous gene, cyclophilin B, expression in the lungs of healthy mice. Balb/c mice were treated intranasally with 10 mg/kg cyclophilin B specific siRNA (Dharmacon) or GFP siRNA in PBS or PBS control. There were five mice per group. The mouse lungs were harvested 24 hours later. Total RNA was purified from the lung samples and reverse transcription was conducted using dT18 primer. Cyclophilin B-specific primers (Applied Biosystem) were used in real-time PCR to quantify the target mRNA level. GAPDH-specific primers (Applied Biosystem) were also used in the PCR as a control.

[0265] As shown in FIG. 6, the cyclophilin B mRNA in the lungs was inhibited by 70% 24 hours after the mice received 10 mg/kg cyclophilin B siRNA intranasally. These data indicate that the airway cell uptake of naked siRNA via intranasal administration is not a specific phenomenon in influenza-infected cells. Endogenous gene silencing in healthy cells in healthy animal can be also achieved by naked siRNA delivered intranasally. This finding is highly relevant for the utility of siRNA for prophylaxis, which would occur in the absence of infection.

### EXAMPLE 19

### Influenza Viral Titer Reduction Following Intranasal Administration of Cochleate siRNA Formulations in Mouse

[0266] The present demonstrates that intranasal administration of the G1498 siRNA in a cochleate delivery formulation (BDSI, North Carolina) enhances influenza viral suppression relative to naked siRNA in mouse. For the instant example, the formulations tested are shown below in Table 25.

TABLE 25
Formulations Administered Intranasally to Mice

| Study Group | Formulation |
|---|---|
| Buffer (Control) | TES + 2 mM Ca⁺² |
| Cochleate Placebo | 40 mg DOPS/ml |
| Cochleate Cyclophilin B siRNA | 4 mg/ml (10 mg/kg) |
| | siRNA by starting material |
| | (0.963 mg/ml by HPLC) |
| Cochleate Unlipidated G1498 | 4 mg/ml siRNA by staring |
| siRNA (U-flu) | material (2.752 mg/ml by HPCL) |
| Cochleate Lipidated G1498 | 4 mg/ml siRNA by |
| siRNA (L-flu) | staring material (1.546 mg/ml HPLC) |
| Naked Unlipidated G1498 siRNA | 6.8 mg/kg siRNA by |
| (U-flu) | staring material (2.752 mg/ml HPLC) |
| Naked Unlipidated G1498 siRNA | 10 mg/kg siRNA |
| (U-flu) | by staring material (4 mg/ml HPLC) |
| Naked Lipidated G1498 siRNA | 10 mg/kg siRNA |
| (U-flu) | by staring material (4 mg/ml HPLC) |

The formulations listed above were administered intranasally five hours post-infection with influenza. The viral titer for the whole lung was measured 48 hours post-infection. There were ten mice in each study group, except the naked unlipidated U-flu groups, which had five.

[0267] The lung viral titer results are shown in FIG. 7. Each dot on the graph represents one animal. Statistics was performed by One-Way-Anova. The numbers with an asteric indicates that the mean value has a statistical difference relative to the controls (placebo or buffer). The data in FIG. 8 show that the G1498 siRNA administered intranasally with the cochleate delivery formulation exhibit greater viral titer reduction relative to the naked G1498 siRNA and the controls (Buffer alone or the Cochleate Placebo). Some degree of toxicity was observed in all groups that receive the cochleate formulations or naked lapidated siRNA.

### EXAMPLE 20

### Influenza Viral Titer Reduction Following Intravenousl Administration of Cochleate siRNA Formulations in Mouse

[0268] The present demonstrates that intravenous administration of the G1498 siRNA in a cochleate delivery formulation enhances influenza viral suppression relative to naked siRNA in mouse. The formulations tested are shown below in Table 26.

TABLE 26
Formulations Administered Intravenouslly to Mice

| Study Group | Formulation |
|---|---|
| Buffer (Control) | TES + 2 mM Ca⁺² |
| Cochleate Placebo | 10 mg DOPS/ml |
| Cochleate Cyclophilin B siRNA | 1 mg/ml (10 mg/kg) |
| | siRNA by starting material |
| | (0.607 mg/ml by HPLC) |
| Cochleate Unlipidated G1498 | 1 mg/ml siRNA by staring |
| siRNA (U-flu) | material (1.196 mg/ml by HPCL) |
| Cochleate Lipidated G1498 | 1 mg/ml siRNA by |
| siRNA (L-flu) | staring material (0.381 mg/ml HPLC) |
| Naked Unlipidated G1498 | 10 mg/kg siRNA by |
| siRNA (U-flu) | staring material (4 mg/ml HPLC) |

The formulations listed above were administered intranasally five hours post-infection with influenza. The viral titer for the whole lung was measured 48 hours post-infection. There were ten mice in each study group, except the naked unlipidated U-flu groups, which had five.

[0269] The lung viral titer results are shown in FIG. 8A. Each dot on the graph represents one animal. Statistics was performed by One-Way-Anova. The numbers with an asteric indicates that the mean value has a statistical difference relative to the controls (placebo or buffer). The data in FIG. 7 show that the G1498 siRNA administered intravenously with the cochleate delivery formulation exhibited greater viral titer reduction relative to the controls (Buffer alone or the Cochleate Placebo). Moreover, the U-flu formulation administered intranasally also reduced lung viral titers.

[0270] A dose response profile was also generated for intravenously administered siRNA delivered in cochleate formulations. The formulations tested are shown below in Table 27.

TABLE 27
Formulations Administered Intravenouslly
to Mice for Dose-Response Study

| Study Group | Formulation |
|---|---|
| Buffer (Control) | TES + 2 mM Ca⁺² |
| Cochleate Unlipidated | 2.5 mg/ml (10 mg/kg) |
| Cyclophilin B siRNA | siRNA by starting material |
| Cochleate Unlipidated G1498 | 2.5 mg/ml |
| siRNA (U-flu) | siRNA by staring material |
| Cochleate Unlipidated G1498 | 1 mg/ml |
| siRNA (L-flu) | siRNA by staring material |
| Cochleate Unlipidated G1498 | 0.4 mg/kg |
| siRNA (U-flu) | siRNA by staring material |
| Cochleate Unlipidated G1498 | 0.15 mg/kg |
| siRNA (U-flu) | siRNA by staring material |

The formulations listed above were administered intranasally five hours post-infection with influenza. The viral titer for the whole lung was measured 48 hours post-infection. There were ten mice in each study group.

[0271] The lung viral titer results are shown in FIG. 8B. Each dot on the graph represents one animal. Statistics was performed by One-Way-Anova. The numbers with an asteric indicates that the mean value has a statistical difference relative to the controls (placebo or buffer). The data in FIG. 8 show that the G1498 siRNA administered intravenously with the cochleate delivery formulation exhibited greater viral titer reduction relative to the Buffer control. Moreover, a dose-response was observed. As the dose of the G1498 siRNA in the cochleate formulation increased a greater reduction in mouse lung viral titers was observed.

[0272] The same formulations listed in Table 27 above were administered via oral gavage to mice following the same protocols and procedures for measuring mouse lung viral titers. The lung viral titer results are shown in FIG. 8B. As stated previously, each dot represents an animal. No statistical differences among the test formulation were observed. Additionally, no toxicity was observed in any of the study groups.

### EXAMPLE 21

### Distribution of Rhodamine-Cochleate in the Mouse Lung Before and After Influenza Infection

[0273] The present example demonstrates that intranasal administration of the rhodamine-cochleate siRNA-free formulation showed a wide distribution of the rhodamine compared to intravenous or oral gavage administration. For the purpose of the instant example, rhodamine was encapsulated in the siRNA-free cochleate. The rhodamine-cochleate formulation was administered via intranasal (40 mg/ml, 50 μl/mouse), intravenous (10 mg/ml, 200 μl/mouse) or oral gavage (10 mg/ml, 200 μl/mouse) four hours either pre- or post-influenza infection. The mouse lung tissue was collected five hours after the final injection or infection and then frozen with dry ice and sectioned for analysis. The frozen sections was stained with DAPI for nuclei and imaged.

[0274] The results from pre- and post-influenza infection were similar for all groups. However, the group subject to the intranasal administration of the rhodamine-cochleate formulation showed a wide distribution of rhodamine in the lung section. The group subject to the intravenous administration showed some rhodamine aggregation but had limited distributed positive signal. The ones with oral gavage did not show positive signals. These data indicate that thorough distribution of a cochleate formulation in the lung for treatment of a respiratory virus infection is best achieved with intranasal administration. Thorough distribution within the lung is essential for effective reduction of viral titers.

What is claimed is:

1. A double-stranded ribonucleic acid (dsRNA) molecule that decreases expression of a respiratory virus gene by RNA interference, wherein the dsRNA molecule has a double-stranded region of from about 15 to about 60 base pairs, the dsRNA molecule comprising:
a. a first strand comprising from about 15 to about 60 nucleotides having a region of at least 15 contiguous nucleotides that are 100% complementary to a nucleic acid sequence of the respiratory virus gene, wherein the region of at least 15 contiguous nucleotides is present in a homologous gene of the virus in at least about 70% of the respiratory virus variants (strains) containing the homologous gene, except for no more than three (3) nucleotide mismatches among the region of at least 15 contiguous nucleotides; and
b. a second strand comprising from about 15 to about 60 nucleotides that is at least 70% complementary to the first strand.

2. The dsRNA molecule of claim 1, wherein the double-stranded region is from about 15 to about 40 base pairs, the dsRNA molecule comprising:
a. a first strand comprising from about 15 to about 40 nucleotides having a region of at least 19 contiguous nucleotides that are 100% complementary to a nucleic acid sequence of the respiratory virus gene, wherein the region of at least 19 contiguous nucleotides is present in a homologous gene of the virus in at least about 84% of the respiratory virus variants (strains) containing the homologous gene, except for no more than three (3) nucleotide mismatches among the region of at least 19 contiguous nucleotides; and
b. a second strand comprising from about 15 to about 40 nucleotides that is at least 70% complementary to the first strand.

3. The dsRNA molecule of claim 1, wherein the double-stranded region is from about 15 to about 40 base pairs, the dsRNA molecule comprising:
a. a first strand comprising from about 15 to about 40 nucleotides having a region of at least 25 contiguous nucleotides that are 100% complementary to a nucleic acid sequence of the respiratory virus gene, wherein the region of at least 25 contiguous nucleotides is present in a homologous gene of the virus in at least about 88% of the respiratory virus variants (strains) containing the homologous gene, except for no more than three (3) nucleotide mismatches among the region of at least 25 contiguous nucleotides; and
b. a second strand comprising from about 15 to about 40 nucleotides that is at least 70% complementary to the first strand.

4. The dsRNA molecule of claim 1, wherein the double-stranded region is from about 15 to about 60 base pairs, the dsRNA molecule comprising:
a. a first strand comprising from about 15 to about 60 nucleotides having a region of at least 15 contiguous nucleotides that are 100% complementary to a nucleic acid sequence of the respiratory virus gene, wherein the region of at least 15 contiguous nucleotides is present in a homologous gene of the virus in at least about 88% of the respiratory virus variants (strains) containing the homologous gene, except for no more than one (1) nucleotide mismatch among the region of at least 15 contiguous nucleotides; and
b. a second strand comprising from about 15 to about 60 nucleotides that is at least 70% complementary to the first strand.

5. The dsRNA molecule of claim 1, wherein the dsRNA molecule is an siRNA or an shRNA.

6. The dsRNA molecule of claim 1, wherein the dsRNA molecule has a 3′ overhang.

7. The dsRNA molecule of claim 1, wherein the dsRNA molecule has a 3′ overhang containing a deoxythymidine (dT).

8. The dsRNA molecule of claim 1, wherein the respiratory virus is influenza A virus.

9. The dsRNA molecule of claim 1, wherein the dsRNA molecule is an shRNA further comprising a hairpin loop structure.

10. The dsRNA molecule of claim 1, wherein the dsRNA molecule is an shRNA further comprising a hairpin loop structure having from 4 to 11 nucleotides.

11. The dsRNA molecule of claim 1, wherein the dsRNA molecule decreases expression of a respiratory virus gene by at least about 25% by RNA interference in a mammalian cell.

12. A double-stranded ribonucleic acid (dsRNA) molecule that decreases expression of a respiratory virus gene by RNA interference, wherein the dsRNA molecule has a double-stranded region of from about 15 to about 60 base pairs, the dsRNA molecule comprising:
a. a first strand comprising from about 15 to about 60 nucleotides having a region of at least 15 contiguous nucleotides that are 100% complementary to a nucleic acid sequence of the respiratory virus gene selected from the group consisting of SEQ ID NOS. 1-16949, wherein the region of at least 15 contiguous nucleotides is present in a homologous gene of the virus in at least about 70% of the respiratory virus variants (strains) containing the homologous gene, except for no more than three (3) nucleotide mismatches among the region of at least 15 contiguous nucleotides; and
b. a second strand comprising from about 15 to about 60 nucleotides that is at least 70% complementary to the first strand.

13. A double-stranded ribonucleic acid (dsRNA) molecule that decreases expression of a respiratory virus gene by RNA interference, wherein the dsRNA molecule has a double-stranded region of from about 15 to about 40 base pairs, the dsRNA molecule comprising:
a. a first strand comprising from about 15 to about 40 nucleotides having a region of at least 19 contiguous nucleotides that are 100% complementary to a nucleic acid sequence of the respiratory virus gene selected from the group consisting of SEQ ID NOS. 1-16949, wherein the region of at least 19 contiguous nucleotides is present in a homologous gene of the virus in at least about 84% of the respiratory virus variants (strains) containing the homologous gene, except for no more than three (3) nucleotide mismatches among the region of at least 19 contiguous nucleotides; and
b. a second strand comprising from about 15 to about 40 nucleotides that is at least 70% complementary to the first strand.

14. A double-stranded ribonucleic acid (dsRNA) molecule that decreases expression of a respiratory virus gene by RNA interference, wherein the dsRNA molecule has a double-stranded region of from about 15 to about 40 base pairs, the dsRNA molecule comprising:
a. a first strand comprising from about 15 to about 40 nucleotides having a region of at least 25 contiguous nucleotides that are 100% complementary to a nucleic acid sequence of the respiratory virus gene selected from the group consisting of SEQ ID NOS. 1-16949, wherein the region of at least 25 contiguous nucleotides is present in a homologous gene of the virus in at least about 88% of the respiratory virus variants (strains) containing the homologous gene, except for no more than three (3) nucleotide mismatches among the region of at least 25 contiguous nucleotides; and
b. a second strand comprising from about 15 to about 40 nucleotides that is at least 70% complementary to the first strand.

15. A double-stranded ribonucleic acid (dsRNA) molecule that decreases expression of a respiratory virus gene by RNA interference, wherein the dsRNA molecule has a double-stranded region of from about 15 to about 60 base pairs, the dsRNA molecule comprising:
a. a first strand comprising from about 15 to about 60 nucleotides having a region of at least 15 contiguous nucleotides that are 100% complementary to a nucleic acid sequence of the respiratory virus gene selected from the group consisting of SEQ ID NOS. 1-16949, wherein the region of at least 15 contiguous nucleotides is present in a homologous gene of the virus in at least about 70% of the respiratory virus variants (strains) containing the homologous gene, except for no more than one (1) nucleotide mismatch among the region of at least 15 contiguous nucleotides; and
b. a second strand comprising from about 15 to about 60 nucleotides that is at least 70% complementary to the first strand.

16. The dsRNA molecule of claim 12, wherein the dsRNA molecule is an siRNA or an shRNA.

17. The dsRNA molecule of claim 12, wherein the dsRNA molecule has a 3′ overhang.

18. The dsRNA molecule of claim 12, wherein the dsRNA molecule has a 3′ overhang containing a deoxythymidine (dT).

19. The dsRNA molecule of claim 12, wherein the respiratory virus is influenza A virus.

20. The dsRNA molecule of claim 12, wherein the dsRNA molecule is an shRNA further comprising a hairpin loop structure.

21. The dsRNA molecule of claim 12, wherein the dsRNA molecule is an shRNA further comprising a hairpin loop structure having from 4 to 11 nucleotides.

22. The dsRNA molecule of claim 12, wherein the dsRNA molecule decreases expression of a respiratory virus gene by at least about 25% by RNA interference in a mammalian cell.

23. A composition comprising a dsRNA according to claim 1 and a delivery agent.

24. A composition comprising two or more dsRNAs according to claim 1.

25. A composition comprising two or more dsRNAs according to claim 1, wherein the genes are from two or more strains of the same viral species.

26. A composition comprising two or more dsRNAs according to claim 1, wherein the genes are from two or more species of the same viral genus.

27. A composition comprising two or more dsRNAs according to claim 1, wherein the genes are from two viruses of the same viral family.

28. A composition comprising two or more dsRNAs according to claim 1, further comprising a delivery agent.

29. A method of preventing or treating a viral infection in a subject comprising administering an effective amount of a therapeutic dsRNA molecule according to claim 1.

30. The method of claim 29, wherein the virus is influenza A.

31. The method of claim 29, wherein the dsRNA is administered to the subject at a dosage of from about 0.1 mg/kg to about 20 mg/kg of body weight.

32. The method of claim 29, wherein the administration is intranasal, inhalation, oral, or intravenous.

33. A method of inhibiting production of a respiratory virus by RNA interference in a mammalian cell comprising providing a dsRNA according to claim 1 and contacting the cell with the dsRNA.

34. The method of claim 33, wherein the virus is influenza A.

The application's sequence listing, which the Patent Office published only in electronic form, follows.

SEQUENCE LISTING (17261 sequences)

SEQ ID NO: 1 - RNA, 19 nt, Artificial Sequence
  Synthetic Oligonucleotide
agccagacagcgaccaaaa

SEQ ID NO: 2 - RNA, 19 nt, Artificial Sequence
  Synthetic Oligonucleotide
gccagacagcgaccaaaag

SEQ ID NO: 3 - RNA, 19 nt, Artificial Sequence
  Synthetic Oligonucleotide
gacagccagacagcgacca

SEQ ID NO: 4 - RNA, 19 nt, Artificial Sequence
  Synthetic Oligonucleotide
cagccagacagcgaccaaa

SEQ ID NO: 5 - RNA, 19 nt, Artificial Sequence
  Synthetic Oligonucleotide
acagccagacagcgaccaa

SEQ ID NO: 6 - RNA, 19 nt, Artificial Sequence
  Synthetic Oligonucleotide
agcauacuuacugacagcc

SEQ ID NO: 7 - RNA, 19 nt, Artificial Sequence
  Synthetic Oligonucleotide
auacuuacugacagccaga

SEQ ID NO: 8 - RNA, 19 nt, Artificial Sequence
  Synthetic Oligonucleotide
cauacuuacugacagccag

SEQ ID NO: 9 - RNA, 19 nt, Artificial Sequence
  Synthetic Oligonucleotide
gcauacuuacugacagcca

SEQ ID NO: 10 - RNA, 19 nt, Artificial Sequence
  Synthetic Oligonucleotide
acuuacugacagccagaca

SEQ ID NO: 11 - RNA, 19 nt, Artificial Sequence
  Synthetic Oligonucleotide
cuuacugacagccagacag

SEQ ID NO: 12 - RNA, 19 nt, Artificial Sequence
  Synthetic Oligonucleotide
uacuuacugacagccagac

SEQ ID NO: 13 - RNA, 19 nt, Artificial Sequence
  Synthetic Oligonucleotide
cagacagcgaccaaaagaa

SEQ ID NO: 14 - RNA, 19 nt, Artificial Sequence
  Synthetic Oligonucleotide
uacugacagccagacagcg

SEQ ID NO: 15 - RNA, 19 nt, Artificial Sequence
  Synthetic Oligonucleotide
uuacugacagccagacagc

SEQ ID NO: 16 - RNA, 19 nt, Artificial Sequence
  Synthetic Oligonucleotide
acugacagccagacagcga

SEQ ID NO: 17 - RNA, 19 nt, Artificial Sequence
  Synthetic Oligonucleotide
ugacagccagacagcgacc

SEQ ID NO: 18 - RNA, 19 nt, Artificial Sequence
  Synthetic Oligonucleotide
cugacagccagacagcgac

SEQ ID NO: 19 - RNA, 19 nt, Artificial Sequence
  Synthetic Oligonucleotide
agacagcgaccaaaagaau

SEQ ID NO: 20 - RNA, 19 nt, Artificial Sequence
  Synthetic Oligonucleotide
ccagacagcgaccaaaaga

SEQ ID NO: 21 - RNA, 19 nt, Artificial Sequence
  Synthetic Oligonucleotide
acagcgaccaaaagaauuc

SEQ ID NO: 22 - RNA, 19 nt, Artificial Sequence
  Synthetic Oligonucleotide
gacagcgaccaaaagaauu

SEQ ID NO: 23 - RNA, 19 nt, Artificial Sequence
  Synthetic Oligonucleotide
cagcgaccaaaagaauucg

SEQ ID NO: 24 - RNA, 19 nt, Artificial Sequence
  Synthetic Oligonucleotide
acucuagcauacuuacuga

SEQ ID NO: 25 - RNA, 19 nt, Artificial Sequence
  Synthetic Oligonucleotide
cucuagcauacuuacugac

SEQ ID NO: 26 - RNA, 19 nt, Artificial Sequence
  Synthetic Oligonucleotide
cuagcauacuuacugacag

SEQ ID NO: 27 - RNA, 19 nt, Artificial Sequence
  Synthetic Oligonucleotide
ucuagcauacuuacugaca

SEQ ID NO: 28 - RNA, 19 nt, Artificial Sequence
  Synthetic Oligonucleotide
uagcauacuuacugacagc

SEQ ID NO: 29 - RNA, 19 nt, Artificial Sequence
  Synthetic Oligonucleotide
gacucuagcauacuuacug

SEQ ID NO: 30 - RNA, 19 nt, Artificial Sequence
  Synthetic Oligonucleotide
gcgaccaaaagaauucgga

SEQ ID NO: 31 - RNA, 19 nt, Artificial Sequence
  Synthetic Oligonucleotide
caaaagaauucggauggcc

SEQ ID NO: 32 - RNA, 19 nt, Artificial Sequence
  Synthetic Oligonucleotide
gaccaaaagaauucggaug

SEQ ID NO: 33 - RNA, 19 nt, Artificial Sequence
  Synthetic Oligonucleotide
cgaccaaaagaauucggau

SEQ ID NO: 34 - RNA, 19 nt, Artificial Sequence
  Synthetic Oligonucleotide
agcgaccaaaagaauucgg

SEQ ID NO: 35 - RNA, 19 nt, Artificial Sequence
  Synthetic Oligonucleotide
aaaagaauucggauggcca

SEQ ID NO: 36 - RNA, 19 nt, Artificial Sequence
  Synthetic Oligonucleotide
aaagaauucggauggccau

SEQ ID NO: 37 - RNA, 19 nt, Artificial Sequence
  Synthetic Oligonucleotide
ccaaaagaauucggauggc

SEQ ID NO: 38 - RNA, 19 nt, Artificial Sequence
  Synthetic Oligonucleotide
accaaaagaauucggaugg

SEQ ID NO: 39 - RNA, 19 nt, Artificial Sequence
  Synthetic Oligonucleotide
aaagguuaaaacauggaac

SEQ ID NO: 40 - RNA, 19 nt, Artificial Sequence
  Synthetic Oligonucleotide
gaaagguuaaaacauggaa

SEQ ID NO: 41 - RNA, 19 nt, Artificial Sequence
  Synthetic Oligonucleotide
uggaugauggcaaugaaau

SEQ ID NO: 42 - RNA, 19 nt, Artificial Sequence
  Synthetic Oligonucleotide
ggaugauggcaaugaaaua

SEQ ID NO: 43 - RNA, 19 nt, Artificial Sequence
  Synthetic Oligonucleotide
aaauggaugauggcaauga

SEQ ID NO: 44 - RNA, 19 nt, Artificial Sequence
  Synthetic Oligonucleotide
gaaauggaugauggcaaug

SEQ ID NO: 45 - RNA, 19 nt, Artificial Sequence
  Synthetic Oligonucleotide
ugaaauggaugauggcaau

SEQ ID NO: 46 - RNA, 19 nt, Artificial Sequence
  Synthetic Oligonucleotide
aagaauucggauggccauc

SEQ ID NO: 47 - RNA, 19 nt, Artificial Sequence
  Synthetic Oligonucleotide
augaaauggaugauggcaa

SEQ ID NO: 48 - RNA, 19 nt, Artificial Sequence
  Synthetic Oligonucleotide
auggaugauggcaaugaaa

SEQ ID NO: 49 - RNA, 19 nt, Artificial Sequence
  Synthetic Oligonucleotide
aauggaugauggcaaugaa

SEQ ID NO: 50 - RNA, 19 nt, Artificial Sequence
  Synthetic Oligonucleotide
agaauucggauggccauca

SEQ ID NO: 51 - RNA, 19 nt, Artificial Sequence
  Synthetic Oligonucleotide
gaauucggauggccaucaa

SEQ ID NO: 52 - RNA, 19 nt, Artificial Sequence
  Synthetic Oligonucleotide
aauucggauggccaucaau

SEQ ID NO: 53 - RNA, 19 nt, Artificial Sequence
  Synthetic Oligonucleotide
auucggauggccaucaauu

SEQ ID NO: 54 - RNA, 19 nt, Artificial Sequence
  Synthetic Oligonucleotide
uucggauggccaucaauua

SEQ ID NO: 55 - RNA, 19 nt, Artificial Sequence
  Synthetic Oligonucleotide
gggacucuagcauacuuac

SEQ ID NO: 56 - RNA, 19 nt, Artificial Sequence
  Synthetic Oligonucleotide
aacgggacucuagcauacu

SEQ ID NO: 57 - RNA, 19 nt, Artificial Sequence
  Synthetic Oligonucleotide
acgggacucuagcauacuu

SEQ ID NO: 58 - RNA, 19 nt, Artificial Sequence
  Synthetic Oligonucleotide
aaacgggacucuagcauac

SEQ ID NO: 59 - RNA, 19 nt, Artificial Sequence
  Synthetic Oligonucleotide
cgggacucuagcauacuua

SEQ ID NO: 60 - RNA, 19 nt, Artificial Sequence
  Synthetic Oligonucleotide
ggacucuagcauacuuacu

SEQ ID NO: 61 - RNA, 19 nt, Artificial Sequence
  Synthetic Oligonucleotide
caagcuguggauauaugca

SEQ ID NO: 62 - RNA, 19 nt, Artificial Sequence
  Synthetic Oligonucleotide
aagcuguggauauaugcaa

SEQ ID NO: 63 - RNA, 19 nt, Artificial Sequence
  Synthetic Oligonucleotide
augaaacgaaaacgggacu

SEQ ID NO: 64 - RNA, 19 nt, Artificial Sequence
  Synthetic Oligonucleotide
agguuaaaacauggaaccu

SEQ ID NO: 65 - RNA, 19 nt, Artificial Sequence
  Synthetic Oligonucleotide
aagguuaaaacauggaacc

SEQ ID NO: 66 - RNA, 19 nt, Artificial Sequence
  Synthetic Oligonucleotide
gguuaaaacauggaaccuu

SEQ ID NO: 67 - RNA, 19 nt, Artificial Sequence
  Synthetic Oligonucleotide
ugaaacgaaaacgggacuc

SEQ ID NO: 68 - RNA, 19 nt, Artificial Sequence
  Synthetic Oligonucleotide
uaaaagcaguuagagguga

SEQ ID NO: 69 - RNA, 19 nt, Artificial Sequence
  Synthetic Oligonucleotide
aacaagcuguggauauaug

SEQ ID NO: 70 - RNA, 19 nt, Artificial Sequence
  Synthetic Oligonucleotide
gaacaagcuguggauauau

SEQ ID NO: 71 - RNA, 19 nt, Artificial Sequence
  Synthetic Oligonucleotide
ugaugguugcauacauguu

SEQ ID NO: 72 - RNA, 19 nt, Artificial Sequence
  Synthetic Oligonucleotide
acaagcuguggauauaugc

SEQ ID NO: 73 - RNA, 19 nt, Artificial Sequence
  Synthetic Oligonucleotide
ugguugcauacauguuaga

SEQ ID NO: 74 - RNA, 19 nt, Artificial Sequence
  Synthetic Oligonucleotide
augguugcauacauguuag

SEQ ID NO: 75 - RNA, 19 nt, Artificial Sequence
  Synthetic Oligonucleotide
uugaugguugcauacaugu

SEQ ID NO: 76 - RNA, 19 nt, Artificial Sequence
  Synthetic Oligonucleotide
uaaaacauggaaccuuugg

SEQ ID NO: 77 - RNA, 19 nt, Artificial Sequence
  Synthetic Oligonucleotide
uuaaaacauggaaccuuug

SEQ ID NO: 78 - RNA, 19 nt, Artificial Sequence
  Synthetic Oligonucleotide
uugcauacauguuagagag

SEQ ID NO: 79 - RNA, 19 nt, Artificial Sequence
  Synthetic Oligonucleotide
gaugguugcauacauguua

SEQ ID NO: 80 - RNA, 19 nt, Artificial Sequence
  Synthetic Oligonucleotide
guugcauacauguuagaga

SEQ ID NO: 81 - RNA, 19 nt, Artificial Sequence
  Synthetic Oligonucleotide
gguugcauacauguuagag

SEQ ID NO: 82 - RNA, 19 nt, Artificial Sequence
  Synthetic Oligonucleotide
guuaaaacauggaaccuuu

SEQ ID NO: 83 - RNA, 19 nt, Artificial Sequence
  Synthetic Oligonucleotide
gaaacgaaaacgggacucu

SEQ ID NO: 84 - RNA, 19 nt, Artificial Sequence
  Synthetic Oligonucleotide
aaacgaaaacgggacucua

SEQ ID NO: 85 - RNA, 19 nt, Artificial Sequence
  Synthetic Oligonucleotide
aacgaaaacgggacucuag

SEQ ID NO: 86 - RNA, 19 nt, Artificial Sequence
  Synthetic Oligonucleotide
acgaaaacgggacucuagc

SEQ ID NO: 87 - RNA, 19 nt, Artificial Sequence
  Synthetic Oligonucleotide
cgaaaacgggacucuagca

SEQ ID NO: 88 - RNA, 19 nt, Artificial Sequence
  Synthetic Oligonucleotide
gaaaacgggacucuagcau

SEQ ID NO: 89 - RNA, 19 nt, Artificial Sequence
  Synthetic Oligonucleotide
aaaacgggacucuagcaua

SEQ ID NO: 90 - RNA, 19 nt, Artificial Sequence
  Synthetic Oligonucleotide
aacauggaaccuuuggccc

SEQ ID NO: 91 - RNA, 19 nt, Artificial Sequence
  Synthetic Oligonucleotide
aaacauggaaccuuuggcc

SEQ ID NO: 92 - RNA, 19 nt, Artificial Sequence
  Synthetic Oligonucleotide
aaaacauggaaccuuuggc

SEQ ID NO: 93 - RNA, 19 nt, Artificial Sequence
  Synthetic Oligonucleotide
augagaauacuuguaaggg

SEQ ID NO: 94 - RNA, 19 nt, Artificial Sequence
  Synthetic Oligonucleotide
ugagaauacuuguaagggg

SEQ ID NO: 95 - RNA, 19 nt, Artificial Sequence
  Synthetic Oligonucleotide
aggaugaaauggaugaugg

SEQ ID NO: 96 - RNA, 19 nt, Artificial Sequence
  Synthetic Oligonucleotide
ggaugaaauggaugauggc

SEQ ID NO: 97 - RNA, 19 nt, Artificial Sequence
  Synthetic Oligonucleotide
uaggaugaaauggaugaug

SEQ ID NO: 98 - RNA, 19 nt, Artificial Sequence
  Synthetic Oligonucleotide
uuaggaugaaauggaugau

SEQ ID NO: 99 - RNA, 19 nt, Artificial Sequence
  Synthetic Oligonucleotide
cuuaggaugaaauggauga

SEQ ID NO: 100 - RNA, 19 nt, Artificial Sequence
  Synthetic Oligonucleotide
acuuaggaugaaauggaug

SEQ ID NO: 101 - RNA, 19 nt, Artificial Sequence
  Synthetic Oligonucleotide
cacuuaggaugaaauggau

SEQ ID NO: 102 - RNA, 19 nt, Artificial Sequence
  Synthetic Oligonucleotide
ucacuuaggaugaaaugga

SEQ ID NO: 103 - RNA, 19 nt, Artificial Sequence
  Synthetic Oligonucleotide
cucgcacucgcgagauacu

SEQ ID NO: 104 - RNA, 19 nt, Artificial Sequence
  Synthetic Oligonucleotide
ucucgcacucgcgagauac

SEQ ID NO: 105 - RNA, 19 nt, Artificial Sequence
  Synthetic Oligonucleotide
guaaugaaacgaaaacggg

SEQ ID NO: 106 - RNA, 19 nt, Artificial Sequence
  Synthetic Oligonucleotide
uaaugaaacgaaaacggga

SEQ ID NO: 107 - RNA, 19 nt, Artificial Sequence
  Synthetic Oligonucleotide
aaugaaacgaaaacgggac

SEQ ID NO: 108 - RNA, 19 nt, Artificial Sequence
  Synthetic Oligonucleotide
auacucagaaaagcaacca

SEQ ID NO: 109 - RNA, 19 nt, Artificial Sequence
  Synthetic Oligonucleotide
uacucagaaaagcaaccag

SEQ ID NO: 110 - RNA, 19 nt, Artificial Sequence
  Synthetic Oligonucleotide
ucggauggccaucaauuaa

SEQ ID NO: 111 - RNA, 19 nt, Artificial Sequence
  Synthetic Oligonucleotide
gaugaaauggaugauggca

SEQ ID NO: 112 - RNA, 19 nt, Artificial Sequence
  Synthetic Oligonucleotide
uuugcagccgcuccaccaa

SEQ ID NO: 113 - RNA, 19 nt, Artificial Sequence
  Synthetic Oligonucleotide
auggaaccuuuggcccugu

SEQ ID NO: 114 - RNA, 19 nt, Artificial Sequence
  Synthetic Oligonucleotide
uugcagccgcuccaccaaa

SEQ ID NO: 115 - RNA, 19 nt, Artificial Sequence
  Synthetic Oligonucleotide
cauggaaccuuuggcccug

SEQ ID NO: 116 - RNA, 19 nt, Artificial Sequence
  Synthetic Oligonucleotide
acauggaaccuuuggcccu

SEQ ID NO: 117 - RNA, 19 nt, Artificial Sequence
  Synthetic Oligonucleotide
guggaccauauggccauaa

SEQ ID NO: 118 - RNA, 19 nt, Artificial Sequence
  Synthetic Oligonucleotide
uggaccauauggccauaau

SEQ ID NO: 119 - RNA, 19 nt, Artificial Sequence
  Synthetic Oligonucleotide
auguaauuauggaaguugu

SEQ ID NO: 120 - RNA, 19 nt, Artificial Sequence
  Synthetic Oligonucleotide
gauguaauuauggaaguug

SEQ ID NO: 121 - RNA, 19 nt, Artificial Sequence
  Synthetic Oligonucleotide
guaauuauggaaguuguuu

SEQ ID NO: 122 - RNA, 19 nt, Artificial Sequence
  Synthetic Oligonucleotide
uaauuauggaaguuguuuu

SEQ ID NO: 123 - RNA, 19 nt, Artificial Sequence
  Synthetic Oligonucleotide
gccgcuccaccaaagcaaa

SEQ ID NO: 124 - RNA, 19 nt, Artificial Sequence
  Synthetic Oligonucleotide
uguaauuauggaaguuguu

SEQ ID NO: 125 - RNA, 19 nt, Artificial Sequence
  Synthetic Oligonucleotide
ccgcuccaccaaagcaaag

SEQ ID NO: 126 - RNA, 19 nt, Artificial Sequence
  Synthetic Oligonucleotide
cagccgcuccaccaaagca

SEQ ID NO: 127 - RNA, 19 nt, Artificial Sequence
  Synthetic Oligonucleotide
gcagccgcuccaccaaagc

SEQ ID NO: 128 - RNA, 19 nt, Artificial Sequence
  Synthetic Oligonucleotide
agccgcuccaccaaagcaa

SEQ ID NO: 129 - RNA, 19 nt, Artificial Sequence
  Synthetic Oligonucleotide
ugauaaaagcaguuagagg

SEQ ID NO: 130 - RNA, 19 nt, Artificial Sequence
  Synthetic Oligonucleotide
gaagaacaagcuguggaua

SEQ ID NO: 131 - RNA, 19 nt, Artificial Sequence
  Synthetic Oligonucleotide
augauaaaagcaguuagag

SEQ ID NO: 132 - RNA, 19 nt, Artificial Sequence
  Synthetic Oligonucleotide
aagaacaagcuguggauau

SEQ ID NO: 133 - RNA, 19 nt, Artificial Sequence
  Synthetic Oligonucleotide
agaacaagcuguggauaua

SEQ ID NO: 134 - RNA, 19 nt, Artificial Sequence
  Synthetic Oligonucleotide
ugcagccgcuccaccaaag

SEQ ID NO: 135 - RNA, 19 nt, Artificial Sequence
  Synthetic Oligonucleotide
auguacacuccagguggag

SEQ ID NO: 136 - RNA, 19 nt, Artificial Sequence
  Synthetic Oligonucleotide
uguacacuccagguggaga

SEQ ID NO: 137 - RNA, 19 nt, Artificial Sequence
  Synthetic Oligonucleotide
auaaaagcaguuagaggug

SEQ ID NO: 138 - RNA, 19 nt, Artificial Sequence
  Synthetic Oligonucleotide
gauaaaagcaguuagaggu

SEQ ID NO: 139 - RNA, 19 nt, Artificial Sequence
  Synthetic Oligonucleotide
acaugguggaauagaaaug

SEQ ID NO: 140 - RNA, 19 nt, Artificial Sequence
  Synthetic Oligonucleotide
caugguggaauagaaaugg

SEQ ID NO: 141 - RNA, 19 nt, Artificial Sequence
  Synthetic Oligonucleotide
ugguaaugaaacgaaaacg

SEQ ID NO: 142 - RNA, 19 nt, Artificial Sequence
  Synthetic Oligonucleotide
uugguaaugaaacgaaaac

SEQ ID NO: 143 - RNA, 19 nt, Artificial Sequence
  Synthetic Oligonucleotide
ugguggaauagaaauggac

SEQ ID NO: 144 - RNA, 19 nt, Artificial Sequence
  Synthetic Oligonucleotide
ccuggucaugcagaccuca

SEQ ID NO: 145 - RNA, 19 nt, Artificial Sequence
  Synthetic Oligonucleotide
augguggaauagaaaugga

SEQ ID NO: 146 - RNA, 19 nt, Artificial Sequence
  Synthetic Oligonucleotide
gguggaauagaaauggacc

SEQ ID NO: 147 - RNA, 19 nt, Artificial Sequence
  Synthetic Oligonucleotide
gguaaugaaacgaaaacgg

SEQ ID NO: 148 - RNA, 19 nt, Artificial Sequence
  Synthetic Oligonucleotide
cuggucaugcagaccucag

SEQ ID NO: 149 - RNA, 19 nt, Artificial Sequence
  Synthetic Oligonucleotide
uauucaacuacaacaagac

SEQ ID NO: 150 - RNA, 19 nt, Artificial Sequence
  Synthetic Oligonucleotide
cggauggccaucaauuaau

SEQ ID NO: 151 - RNA, 19 nt, Artificial Sequence
  Synthetic Oligonucleotide
gcaacagcuauacucagaa

SEQ ID NO: 152 - RNA, 19 nt, Artificial Sequence
  Synthetic Oligonucleotide
caacagcuauacucagaaa

SEQ ID NO: 153 - RNA, 19 nt, Artificial Sequence
  Synthetic Oligonucleotide
gcuauacucagaaaagcaa

SEQ ID NO: 154 - RNA, 19 nt, Artificial Sequence
  Synthetic Oligonucleotide
aacagcuauacucagaaaa

SEQ ID NO: 155 - RNA, 19 nt, Artificial Sequence
  Synthetic Oligonucleotide
cuauacucagaaaagcaac

SEQ ID NO: 156 - RNA, 19 nt, Artificial Sequence
  Synthetic Oligonucleotide
guauucaacuacaacaaga

SEQ ID NO: 157 - RNA, 19 nt, Artificial Sequence
  Synthetic Oligonucleotide
uauacucagaaaagcaacc

SEQ ID NO: 158 - RNA, 19 nt, Artificial Sequence
  Synthetic Oligonucleotide
acagcuauacucagaaaag

SEQ ID NO: 159 - RNA, 19 nt, Artificial Sequence
  Synthetic Oligonucleotide
ccagcauuaagcaucaaug

SEQ ID NO: 160 - RNA, 19 nt, Artificial Sequence
  Synthetic Oligonucleotide
cagcuauacucagaaaagc

SEQ ID NO: 161 - RNA, 19 nt, Artificial Sequence
  Synthetic Oligonucleotide
cagcauuaagcaucaauga

SEQ ID NO: 162 - RNA, 19 nt, Artificial Sequence
  Synthetic Oligonucleotide
agcauuaagcaucaaugaa

SEQ ID NO: 163 - RNA, 19 nt, Artificial Sequence
  Synthetic Oligonucleotide
agcuauacucagaaaagca

SEQ ID NO: 164 - RNA, 19 nt, Artificial Sequence
  Synthetic Oligonucleotide
cucuauuccaacaaaugag

SEQ ID NO: 165 - RNA, 19 nt, Artificial Sequence
  Synthetic Oligonucleotide
acucuauuccaacaaauga

SEQ ID NO: 166 - RNA, 19 nt, Artificial Sequence
  Synthetic Oligonucleotide
gauugcaugauaaaagcag

SEQ ID NO: 167 - RNA, 19 nt, Artificial Sequence
  Synthetic Oligonucleotide
auugcaugauaaaagcagu

SEQ ID NO: 168 - RNA, 19 nt, Artificial Sequence
  Synthetic Oligonucleotide
caugauaaaagcaguuaga

SEQ ID NO: 169 - RNA, 19 nt, Artificial Sequence
  Synthetic Oligonucleotide
gcaugauaaaagcaguuag

SEQ ID NO: 170 - RNA, 19 nt, Artificial Sequence
  Synthetic Oligonucleotide
ugcaugauaaaagcaguua

SEQ ID NO: 171 - RNA, 19 nt, Artificial Sequence
  Synthetic Oligonucleotide
uugcaugauaaaagcaguu

SEQ ID NO: 172 - RNA, 19 nt, Artificial Sequence
  Synthetic Oligonucleotide
ucagugaaacacagggaac

SEQ ID NO: 173 - RNA, 19 nt, Artificial Sequence
  Synthetic Oligonucleotide
gucagugaaacacagggaa

SEQ ID NO: 174 - RNA, 19 nt, Artificial Sequence
  Synthetic Oligonucleotide
acauguuagagagagaacu

SEQ ID NO: 175 - RNA, 19 nt, Artificial Sequence
  Synthetic Oligonucleotide
uacauguuagagagagaac

SEQ ID NO: 176 - RNA, 19 nt, Artificial Sequence
  Synthetic Oligonucleotide
cagauccacuagcaucuuu

SEQ ID NO: 177 - RNA, 19 nt, Artificial Sequence
  Synthetic Oligonucleotide
gcagauccacuagcaucuu

SEQ ID NO: 178 - RNA, 19 nt, Artificial Sequence
  Synthetic Oligonucleotide
uacacuccagguggagaag

SEQ ID NO: 179 - RNA, 19 nt, Artificial Sequence
  Synthetic Oligonucleotide
cauguuagagagagaacuu

SEQ ID NO: 180 - RNA, 19 nt, Artificial Sequence
  Synthetic Oligonucleotide
acacuccagguggagaagu

SEQ ID NO: 181 - RNA, 19 nt, Artificial Sequence
  Synthetic Oligonucleotide
uguuagagagagaacuugu

SEQ ID NO: 182 - RNA, 19 nt, Artificial Sequence
  Synthetic Oligonucleotide
agauccacuagcaucuuua

SEQ ID NO: 183 - RNA, 19 nt, Artificial Sequence
  Synthetic Oligonucleotide
guacacuccagguggagaa

SEQ ID NO: 184 - RNA, 19 nt, Artificial Sequence
  Synthetic Oligonucleotide
auguuagagagagaacuug

SEQ ID NO: 185 - RNA, 19 nt, Artificial Sequence
  Synthetic Oligonucleotide
cauacauguuagagagaga

SEQ ID NO: 186 - RNA, 19 nt, Artificial Sequence
  Synthetic Oligonucleotide
gcauacauguuagagagag

SEQ ID NO: 187 - RNA, 19 nt, Artificial Sequence
  Synthetic Oligonucleotide
ccacuagcaucuuuauugg

SEQ ID NO: 188 - RNA, 19 nt, Artificial Sequence
  Synthetic Oligonucleotide
ugcauacauguuagagaga

SEQ ID NO: 189 - RNA, 19 nt, Artificial Sequence
  Synthetic Oligonucleotide
cacuagcaucuuuauugga

SEQ ID NO: 190 - RNA, 19 nt, Artificial Sequence
  Synthetic Oligonucleotide
auccacuagcaucuuuauu

SEQ ID NO: 191 - RNA, 19 nt, Artificial Sequence
  Synthetic Oligonucleotide
gauccacuagcaucuuuau

SEQ ID NO: 192 - RNA, 19 nt, Artificial Sequence
  Synthetic Oligonucleotide
uggaaagaauaaaagaacu

SEQ ID NO: 193 - RNA, 19 nt, Artificial Sequence
  Synthetic Oligonucleotide
auggaaagaauaaaagaac

SEQ ID NO: 194 - RNA, 19 nt, Artificial Sequence
  Synthetic Oligonucleotide
cacuccagguggagaagug

SEQ ID NO: 195 - RNA, 19 nt, Artificial Sequence
  Synthetic Oligonucleotide
acuccagguggagaaguga

SEQ ID NO: 196 - RNA, 19 nt, Artificial Sequence
  Synthetic Oligonucleotide
ggaaagaauaaaagaacua

SEQ ID NO: 197 - RNA, 19 nt, Artificial Sequence
  Synthetic Oligonucleotide
aaaauggaauuugaaccau

SEQ ID NO: 198 - RNA, 19 nt, Artificial Sequence
  Synthetic Oligonucleotide
auacauguuagagagagaa

SEQ ID NO: 199 - RNA, 19 nt, Artificial Sequence
  Synthetic Oligonucleotide
aaauggaauuugaaccauu

SEQ ID NO: 200 - RNA, 19 nt, Artificial Sequence
  Synthetic Oligonucleotide
auggaauuugaaccauuuc

SEQ ID NO: 201 - RNA, 19 nt, Artificial Sequence
  Synthetic Oligonucleotide
cuccagguggagaagugag

SEQ ID NO: 202 - RNA, 19 nt, Artificial Sequence
  Synthetic Oligonucleotide
uggaauuugaaccauuuca

SEQ ID NO: 203 - RNA, 19 nt, Artificial Sequence
  Synthetic Oligonucleotide
gcuguggauauaugcaagg

SEQ ID NO: 204 - RNA, 19 nt, Artificial Sequence
  Synthetic Oligonucleotide
cuguggauauaugcaaggc

SEQ ID NO: 205 - RNA, 19 nt, Artificial Sequence
  Synthetic Oligonucleotide
aauggaauuugaaccauuu

SEQ ID NO: 206 - RNA, 19 nt, Artificial Sequence
  Synthetic Oligonucleotide
cauauggccauaauuaaga

SEQ ID NO: 207 - RNA, 19 nt, Artificial Sequence
  Synthetic Oligonucleotide
auauggccauaauuaagaa

SEQ ID NO: 208 - RNA, 19 nt, Artificial Sequence
  Synthetic Oligonucleotide
agcuguggauauaugcaag

SEQ ID NO: 209 - RNA, 19 nt, Artificial Sequence
  Synthetic Oligonucleotide
agucucgcacucgcgagau

SEQ ID NO: 210 - RNA, 19 nt, Artificial Sequence
  Synthetic Oligonucleotide
cagucucgcacucgcgaga

SEQ ID NO: 211 - RNA, 19 nt, Artificial Sequence
  Synthetic Oligonucleotide
gucucgcacucgcgagaua

SEQ ID NO: 212 - RNA, 19 nt, Artificial Sequence
  Synthetic Oligonucleotide
gauuucucccaguugcugg

SEQ ID NO: 213 - RNA, 19 nt, Artificial Sequence
  Synthetic Oligonucleotide
agauuucucccaguugcug

SEQ ID NO: 214 - RNA, 19 nt, Artificial Sequence
  Synthetic Oligonucleotide
ccagguggagaagugagga

SEQ ID NO: 215 - RNA, 19 nt, Artificial Sequence
  Synthetic Oligonucleotide
uaugcaaggcugcaauggg

SEQ ID NO: 216 - RNA, 19 nt, Artificial Sequence
  Synthetic Oligonucleotide
auggccauaauuaagaagu

SEQ ID NO: 217 - RNA, 19 nt, Artificial Sequence
  Synthetic Oligonucleotide
uggccauaauuaagaagua

SEQ ID NO: 218 - RNA, 19 nt, Artificial Sequence
  Synthetic Oligonucleotide
gguggagaagugaggaaug

SEQ ID NO: 219 - RNA, 19 nt, Artificial Sequence
  Synthetic Oligonucleotide
guggagaagugaggaauga

SEQ ID NO: 220 - RNA, 19 nt, Artificial Sequence
  Synthetic Oligonucleotide
auaugcaaggcugcaaugg

SEQ ID NO: 221 - RNA, 19 nt, Artificial Sequence
  Synthetic Oligonucleotide
cagguggagaagugaggaa

SEQ ID NO: 222 - RNA, 19 nt, Artificial Sequence
  Synthetic Oligonucleotide
agaacucuauuccaacaaa

SEQ ID NO: 223 - RNA, 19 nt, Artificial Sequence
  Synthetic Oligonucleotide
gaacucuauuccaacaaau

SEQ ID NO: 224 - RNA, 19 nt, Artificial Sequence
  Synthetic Oligonucleotide
agguggagaagugaggaau

SEQ ID NO: 225 - RNA, 19 nt, Artificial Sequence
  Synthetic Oligonucleotide
aacucuauuccaacaaaug

SEQ ID NO: 226 - RNA, 19 nt, Artificial Sequence
  Synthetic Oligonucleotide
auauaugcaaggcugcaau

SEQ ID NO: 227 - RNA, 19 nt, Artificial Sequence
  Synthetic Oligonucleotide
uauggccauaauuaagaag

SEQ ID NO: 228 - RNA, 19 nt, Artificial Sequence
  Synthetic Oligonucleotide
uauaugcaaggcugcaaug

SEQ ID NO: 229 - RNA, 19 nt, Artificial Sequence
  Synthetic Oligonucleotide
gaccauauggccauaauua

SEQ ID NO: 230 - RNA, 19 nt, Artificial Sequence
  Synthetic Oligonucleotide
accauauggccauaauuaa

SEQ ID NO: 231 - RNA, 19 nt, Artificial Sequence
  Synthetic Oligonucleotide
gauauaugcaaggcugcaa

SEQ ID NO: 232 - RNA, 19 nt, Artificial Sequence
  Synthetic Oligonucleotide
ggauauaugcaaggcugca

SEQ ID NO: 233 - RNA, 19 nt, Artificial Sequence
  Synthetic Oligonucleotide
uggauauaugcaaggcugc

SEQ ID NO: 234 - RNA, 19 nt, Artificial Sequence
  Synthetic Oligonucleotide
guggauauaugcaaggcug

SEQ ID NO: 235 - RNA, 19 nt, Artificial Sequence
  Synthetic Oligonucleotide
agaaucagcucauccuuca

SEQ ID NO: 236 - RNA, 19 nt, Artificial Sequence
  Synthetic Oligonucleotide
gaaucagcucauccuucag

SEQ ID NO: 237 - RNA, 19 nt, Artificial Sequence
  Synthetic Oligonucleotide
gaauacuuguaaggggcaa

SEQ ID NO: 238 - RNA, 19 nt, Artificial Sequence
  Synthetic Oligonucleotide
agaauacuuguaaggggca

SEQ ID NO: 239 - RNA, 19 nt, Artificial Sequence
  Synthetic Oligonucleotide
gagaauacuuguaaggggc

SEQ ID NO: 240 - RNA, 19 nt, Artificial Sequence
  Synthetic Oligonucleotide
ggccauuagaggccaauac

SEQ ID NO: 241 - RNA, 19 nt, Artificial Sequence
  Synthetic Oligonucleotide
aggccauuagaggccaaua

SEQ ID NO: 242 - RNA, 19 nt, Artificial Sequence
  Synthetic Oligonucleotide
aaggccauuagaggccaau

SEQ ID NO: 243 - RNA, 19 nt, Artificial Sequence
  Synthetic Oligonucleotide
uacuuguaaggggcaauuc

SEQ ID NO: 244 - RNA, 19 nt, Artificial Sequence
  Synthetic Oligonucleotide
gccauuagaggccaauaca

SEQ ID NO: 245 - RNA, 19 nt, Artificial Sequence
  Synthetic Oligonucleotide
auacuuguaaggggcaauu

SEQ ID NO: 246 - RNA, 19 nt, Artificial Sequence
  Synthetic Oligonucleotide
ccauuagaggccaauacag

SEQ ID NO: 247 - RNA, 19 nt, Artificial Sequence
  Synthetic Oligonucleotide
aauacuuguaaggggcaau

SEQ ID NO: 248 - RNA, 19 nt, Artificial Sequence
  Synthetic Oligonucleotide
uccagguggagaagugagg

SEQ ID NO: 249 - RNA, 19 nt, Artificial Sequence
  Synthetic Oligonucleotide
aaagaauaaaagaacuacg

SEQ ID NO: 250 - RNA, 19 nt, Artificial Sequence
  Synthetic Oligonucleotide
uuagaggccaauacagugg

SEQ ID NO: 251 - RNA, 19 nt, Artificial Sequence
  Synthetic Oligonucleotide
ucagcagauccacuagcau

SEQ ID NO: 252 - RNA, 19 nt, Artificial Sequence
  Synthetic Oligonucleotide
ccauauggccauaauuaag

SEQ ID NO: 253 - RNA, 19 nt, Artificial Sequence
  Synthetic Oligonucleotide
acuuguaaggggcaauucu

SEQ ID NO: 254 - RNA, 19 nt, Artificial Sequence
  Synthetic Oligonucleotide
gaaagaauaaaagaacuac

SEQ ID NO: 255 - RNA, 19 nt, Artificial Sequence
  Synthetic Oligonucleotide
cagcagauccacuagcauc

SEQ ID NO: 256 - RNA, 19 nt, Artificial Sequence
  Synthetic Oligonucleotide
uuguaaggggcaauucucc

SEQ ID NO: 257 - RNA, 19 nt, Artificial Sequence
  Synthetic Oligonucleotide
cuuguaaggggcaauucuc

SEQ ID NO: 258 - RNA, 19 nt, Artificial Sequence
  Synthetic Oligonucleotide
uaucagcagauccacuagc

SEQ ID NO: 259 - RNA, 19 nt, Artificial Sequence
  Synthetic Oligonucleotide
guaucagcagauccacuag

SEQ ID NO: 260 - RNA, 19 nt, Artificial Sequence
  Synthetic Oligonucleotide
gccaauacaguggguuugu

SEQ ID NO: 261 - RNA, 19 nt, Artificial Sequence
  Synthetic Oligonucleotide
uaagagucagcaaaauggg

SEQ ID NO: 262 - RNA, 19 nt, Artificial Sequence
  Synthetic Oligonucleotide
gagaugugccacagcacac

SEQ ID NO: 263 - RNA, 19 nt, Artificial Sequence
  Synthetic Oligonucleotide
gcagucucgcacucgcgag

SEQ ID NO: 264 - RNA, 19 nt, Artificial Sequence
  Synthetic Oligonucleotide
uucaacuacaacaagacca

SEQ ID NO: 265 - RNA, 19 nt, Artificial Sequence
  Synthetic Oligonucleotide
uguggauauaugcaaggcu

SEQ ID NO: 266 - RNA, 19 nt, Artificial Sequence
  Synthetic Oligonucleotide
ucaacuacaacaagaccac

SEQ ID NO: 267 - RNA, 19 nt, Artificial Sequence
  Synthetic Oligonucleotide
ucgcagucucgcacucgcg

SEQ ID NO: 268 - RNA, 19 nt, Artificial Sequence
  Synthetic Oligonucleotide
augucgcagucucgcacuc

SEQ ID NO: 269 - RNA, 19 nt, Artificial Sequence
  Synthetic Oligonucleotide
ugucgcagucucgcacucg

SEQ ID NO: 270 - RNA, 19 nt, Artificial Sequence
  Synthetic Oligonucleotide
cgcagucucgcacucgcga

SEQ ID NO: 271 - RNA, 19 nt, Artificial Sequence
  Synthetic Oligonucleotide
agcacagagaugucaauga

SEQ ID NO: 272 - RNA, 19 nt, Artificial Sequence
  Synthetic Oligonucleotide
aucagcagauccacuagca

SEQ ID NO: 273 - RNA, 19 nt, Artificial Sequence
  Synthetic Oligonucleotide
gucgcagucucgcacucgc

SEQ ID NO: 274 - RNA, 19 nt, Artificial Sequence
  Synthetic Oligonucleotide
auuagaggccaauacagug

SEQ ID NO: 275 - RNA, 19 nt, Artificial Sequence
  Synthetic Oligonucleotide
ggaccauauggccauaauu

SEQ ID NO: 276 - RNA, 19 nt, Artificial Sequence
  Synthetic Oligonucleotide
gcacagagaugucaaugag

SEQ ID NO: 277 - RNA, 19 nt, Artificial Sequence
  Synthetic Oligonucleotide
agcagauccacuagcaucu

SEQ ID NO: 278 - RNA, 19 nt, Artificial Sequence
  Synthetic Oligonucleotide
uacaacaaaauggaauuug

SEQ ID NO: 279 - RNA, 19 nt, Artificial Sequence
  Synthetic Oligonucleotide
acaacaaaauggaauuuga

SEQ ID NO: 280 - RNA, 19 nt, Artificial Sequence
  Synthetic Oligonucleotide
gagaaucagcucauccuuc

SEQ ID NO: 281 - RNA, 19 nt, Artificial Sequence
  Synthetic Oligonucleotide
aagcacagagaugucaaug

SEQ ID NO: 282 - RNA, 19 nt, Artificial Sequence
  Synthetic Oligonucleotide
cagagaugucaaugagagg

SEQ ID NO: 283 - RNA, 19 nt, Artificial Sequence
  Synthetic Oligonucleotide
caagcacagagaugucaau

SEQ ID NO: 284 - RNA, 19 nt, Artificial Sequence
  Synthetic Oligonucleotide
ccaagcacagagaugucaa

SEQ ID NO: 285 - RNA, 19 nt, Artificial Sequence
  Synthetic Oligonucleotide
ugagaaucagcucauccuu

SEQ ID NO: 286 - RNA, 19 nt, Artificial Sequence
  Synthetic Oligonucleotide
cagggaugagaauacuugu

SEQ ID NO: 287 - RNA, 19 nt, Artificial Sequence
  Synthetic Oligonucleotide
auucaacuacaacaagacc

SEQ ID NO: 288 - RNA, 19 nt, Artificial Sequence
  Synthetic Oligonucleotide
ucagggaugagaauacuug

SEQ ID NO: 289 - RNA, 19 nt, Artificial Sequence
  Synthetic Oligonucleotide
cauuagaggccaauacagu

SEQ ID NO: 290 - RNA, 19 nt, Artificial Sequence
  Synthetic Oligonucleotide
agaugugccacagcacaca

SEQ ID NO: 291 - RNA, 19 nt, Artificial Sequence
  Synthetic Oligonucleotide
cacagagaugucaaugaga

SEQ ID NO: 292 - RNA, 19 nt, Artificial Sequence
  Synthetic Oligonucleotide
acagagaugucaaugagag

SEQ ID NO: 293 - RNA, 19 nt, Artificial Sequence
  Synthetic Oligonucleotide
aggaggucagugaaacaca

SEQ ID NO: 294 - RNA, 19 nt, Artificial Sequence
  Synthetic Oligonucleotide
ggaugagaauacuuguaag

SEQ ID NO: 295 - RNA, 19 nt, Artificial Sequence
  Synthetic Oligonucleotide
gaggaggucagugaaacac

SEQ ID NO: 296 - RNA, 19 nt, Artificial Sequence
  Synthetic Oligonucleotide
agggaugagaauacuugua

SEQ ID NO: 297 - RNA, 19 nt, Artificial Sequence
  Synthetic Oligonucleotide
gggaugagaauacuuguaa

SEQ ID NO: 298 - RNA, 19 nt, Artificial Sequence
  Synthetic Oligonucleotide
gaucagggaugagaauacu

SEQ ID NO: 299 - RNA, 19 nt, Artificial Sequence
  Synthetic Oligonucleotide
aucagggaugagaauacuu

SEQ ID NO: 300 - RNA, 19 nt, Artificial Sequence
  Synthetic Oligonucleotide
ggaucagggaugagaauac

SEQ ID NO: 301 - RNA, 19 nt, Artificial Sequence
  Synthetic Oligonucleotide
ggggaucagggaugagaau

SEQ ID NO: 302 - RNA, 19 nt, Artificial Sequence
  Synthetic Oligonucleotide
gggaucagggaugagaaua

SEQ ID NO: 303 - RNA, 19 nt, Artificial Sequence
  Synthetic Oligonucleotide
aggggaucagggaugagaa

SEQ ID NO: 304 - RNA, 19 nt, Artificial Sequence
  Synthetic Oligonucleotide
auaauuaagaaguacacau

SEQ ID NO: 305 - RNA, 19 nt, Artificial Sequence
  Synthetic Oligonucleotide
uaauuaagaaguacacauc

SEQ ID NO: 306 - RNA, 19 nt, Artificial Sequence
  Synthetic Oligonucleotide
ccauaauuaagaaguacac

SEQ ID NO: 307 - RNA, 19 nt, Artificial Sequence
  Synthetic Oligonucleotide
aucgagugaugguaucacc

SEQ ID NO: 308 - RNA, 19 nt, Artificial Sequence
  Synthetic Oligonucleotide
cauaauuaagaaguacaca

SEQ ID NO: 309 - RNA, 19 nt, Artificial Sequence
  Synthetic Oligonucleotide
gccauaauuaagaaguaca

SEQ ID NO: 310 - RNA, 19 nt, Artificial Sequence
  Synthetic Oligonucleotide
ccacaguggaccauauggc

SEQ ID NO: 311 - RNA, 19 nt, Artificial Sequence
  Synthetic Oligonucleotide
accacaguggaccauaugg

SEQ ID NO: 312 - RNA, 19 nt, Artificial Sequence
  Synthetic Oligonucleotide
caguggaccauauggccau

SEQ ID NO: 313 - RNA, 19 nt, Artificial Sequence
  Synthetic Oligonucleotide
acaguggaccauauggcca

SEQ ID NO: 314 - RNA, 19 nt, Artificial Sequence
  Synthetic Oligonucleotide
aguggaccauauggccaua

SEQ ID NO: 315 - RNA, 19 nt, Artificial Sequence
  Synthetic Oligonucleotide
aagaauaaaagaacuacgg

SEQ ID NO: 316 - RNA, 19 nt, Artificial Sequence
  Synthetic Oligonucleotide
ggccauaauuaagaaguac

SEQ ID NO: 317 - RNA, 19 nt, Artificial Sequence
  Synthetic Oligonucleotide
gaucgagugaugguaucac

SEQ ID NO: 318 - RNA, 19 nt, Artificial Sequence
  Synthetic Oligonucleotide
auaagagucagcaaaaugg

SEQ ID NO: 319 - RNA, 19 nt, Artificial Sequence
  Synthetic Oligonucleotide
cacaguggaccauauggcc

SEQ ID NO: 320 - RNA, 19 nt, Artificial Sequence
  Synthetic Oligonucleotide
ugaggggaucagggaugag

SEQ ID NO: 321 - RNA, 19 nt, Artificial Sequence
  Synthetic Oligonucleotide
gugaggggaucagggauga

SEQ ID NO: 322 - RNA, 19 nt, Artificial Sequence
  Synthetic Oligonucleotide
agaauaaaagaacuacgga

SEQ ID NO: 323 - RNA, 19 nt, Artificial Sequence
  Synthetic Oligonucleotide
caucuuuauuggagaugug

SEQ ID NO: 324 - RNA, 19 nt, Artificial Sequence
  Synthetic Oligonucleotide
augacuccaagcacagaga

SEQ ID NO: 325 - RNA, 19 nt, Artificial Sequence
  Synthetic Oligonucleotide
augugaggggaucagggau

SEQ ID NO: 326 - RNA, 19 nt, Artificial Sequence
  Synthetic Oligonucleotide
cuagcaucuuuauuggaga

SEQ ID NO: 327 - RNA, 19 nt, Artificial Sequence
  Synthetic Oligonucleotide
gcaucuuuauuggagaugu

SEQ ID NO: 328 - RNA, 19 nt, Artificial Sequence
  Synthetic Oligonucleotide
gaggggaucagggaugaga

SEQ ID NO: 329 - RNA, 19 nt, Artificial Sequence
  Synthetic Oligonucleotide
aaugugaggggaucaggga

SEQ ID NO: 330 - RNA, 19 nt, Artificial Sequence
  Synthetic Oligonucleotide
ugugaggggaucagggaug

SEQ ID NO: 331 - RNA, 19 nt, Artificial Sequence
  Synthetic Oligonucleotide
uagcaucuuuauuggagau

SEQ ID NO: 332 - RNA, 19 nt, Artificial Sequence
  Synthetic Oligonucleotide
cuccaagcacagagauguc

SEQ ID NO: 333 - RNA, 19 nt, Artificial Sequence
  Synthetic Oligonucleotide
caguaucagcagauccacu

SEQ ID NO: 334 - RNA, 19 nt, Artificial Sequence
  Synthetic Oligonucleotide
uggagaugugccacagcac

SEQ ID NO: 335 - RNA, 19 nt, Artificial Sequence
  Synthetic Oligonucleotide
uccaagcacagagauguca

SEQ ID NO: 336 - RNA, 19 nt, Artificial Sequence
  Synthetic Oligonucleotide
acuagcaucuuuauuggag

SEQ ID NO: 337 - RNA, 19 nt, Artificial Sequence
  Synthetic Oligonucleotide
agcaucuuuauuggagaug

SEQ ID NO: 338 - RNA, 19 nt, Artificial Sequence
  Synthetic Oligonucleotide
aguaucagcagauccacua

SEQ ID NO: 339 - RNA, 19 nt, Artificial Sequence
  Synthetic Oligonucleotide
gacuccaagcacagagaug

SEQ ID NO: 340 - RNA, 19 nt, Artificial Sequence
  Synthetic Oligonucleotide
ugacuccaagcacagagau

SEQ ID NO: 341 - RNA, 19 nt, Artificial Sequence
  Synthetic Oligonucleotide
uuuuaaggcauuuucagaa

SEQ ID NO: 342 - RNA, 19 nt, Artificial Sequence
  Synthetic Oligonucleotide
acuccaagcacagagaugu

SEQ ID NO: 343 - RNA, 19 nt, Artificial Sequence
  Synthetic Oligonucleotide
cuuuuaaggcauuuucaga

SEQ ID NO: 344 - RNA, 19 nt, Artificial Sequence
  Synthetic Oligonucleotide
gcaguaucagcagauccac

SEQ ID NO: 345 - RNA, 19 nt, Artificial Sequence
  Synthetic Oligonucleotide
gccaugguguuuucacaag

SEQ ID NO: 346 - RNA, 19 nt, Artificial Sequence
  Synthetic Oligonucleotide
uuggagaugugccacagca

SEQ ID NO: 347 - RNA, 19 nt, Artificial Sequence
  Synthetic Oligonucleotide
ucuuuauuggagaugugcc

SEQ ID NO: 348 - RNA, 19 nt, Artificial Sequence
  Synthetic Oligonucleotide
cuuuauuggagaugugcca

SEQ ID NO: 349 - RNA, 19 nt, Artificial Sequence
  Synthetic Oligonucleotide
ccaugguguuuucacaaga

SEQ ID NO: 350 - RNA, 19 nt, Artificial Sequence
  Synthetic Oligonucleotide
auuggagaugugccacagc

SEQ ID NO: 351 - RNA, 19 nt, Artificial Sequence
  Synthetic Oligonucleotide
uauuggagaugugccacag

SEQ ID NO: 352 - RNA, 19 nt, Artificial Sequence
  Synthetic Oligonucleotide
acccgucacuuaggaugaa

SEQ ID NO: 353 - RNA, 19 nt, Artificial Sequence
  Synthetic Oligonucleotide
gucacuuaggaugaaaugg

SEQ ID NO: 354 - RNA, 19 nt, Artificial Sequence
  Synthetic Oligonucleotide
cccgucacuuaggaugaaa

SEQ ID NO: 355 - RNA, 19 nt, Artificial Sequence
  Synthetic Oligonucleotide
aucuuuauuggagaugugc

SEQ ID NO: 356 - RNA, 19 nt, Artificial Sequence
  Synthetic Oligonucleotide
ggagaugugccacagcaca

SEQ ID NO: 357 - RNA, 19 nt, Artificial Sequence
  Synthetic Oligonucleotide
ccgucacuuaggaugaaau

SEQ ID NO: 358 - RNA, 19 nt, Artificial Sequence
  Synthetic Oligonucleotide
cgucacuuaggaugaaaug

SEQ ID NO: 359 - RNA, 19 nt, Artificial Sequence
  Synthetic Oligonucleotide
aacccgucacuuaggauga

SEQ ID NO: 360 - RNA, 19 nt, Artificial Sequence
  Synthetic Oligonucleotide
uuagaggugaccugaauuu

SEQ ID NO: 361 - RNA, 19 nt, Artificial Sequence
  Synthetic Oligonucleotide
guuagaggugaccugaauu

SEQ ID NO: 362 - RNA, 19 nt, Artificial Sequence
  Synthetic Oligonucleotide
gaugagaauacuuguaagg

SEQ ID NO: 363 - RNA, 19 nt, Artificial Sequence
  Synthetic Oligonucleotide
acaaaaaccacaguggacc

SEQ ID NO: 364 - RNA, 19 nt, Artificial Sequence
  Synthetic Oligonucleotide
uuauuggagaugugccaca

SEQ ID NO: 365 - RNA, 19 nt, Artificial Sequence
  Synthetic Oligonucleotide
uuuauuggagaugugccac

SEQ ID NO: 366 - RNA, 19 nt, Artificial Sequence
  Synthetic Oligonucleotide
caaaaaccacaguggacca

SEQ ID NO: 367 - RNA, 19 nt, Artificial Sequence
  Synthetic Oligonucleotide
acuacaacaagaccacuaa

SEQ ID NO: 368 - RNA, 19 nt, Artificial Sequence
  Synthetic Oligonucleotide
aacuacaacaagaccacua

SEQ ID NO: 369 - RNA, 19 nt, Artificial Sequence
  Synthetic Oligonucleotide
gaggugaccugaauuucgu

SEQ ID NO: 370 - RNA, 19 nt, Artificial Sequence
  Synthetic Oligonucleotide
agaggugaccugaauuucg

SEQ ID NO: 371 - RNA, 19 nt, Artificial Sequence
  Synthetic Oligonucleotide
uagaggugaccugaauuuc

SEQ ID NO: 372 - RNA, 19 nt, Artificial Sequence
  Synthetic Oligonucleotide
gaggucagugaaacacagg

SEQ ID NO: 373 - RNA, 19 nt, Artificial Sequence
  Synthetic Oligonucleotide
aggucagugaaacacaggg

SEQ ID NO: 374 - RNA, 19 nt, Artificial Sequence
  Synthetic Oligonucleotide
agauaauaaagcuucuccc

SEQ ID NO: 375 - RNA, 19 nt, Artificial Sequence
  Synthetic Oligonucleotide
caacuacaacaagaccacu

SEQ ID NO: 376 - RNA, 19 nt, Artificial Sequence
  Synthetic Oligonucleotide
aaaaccacaguggaccaua

SEQ ID NO: 377 - RNA, 19 nt, Artificial Sequence
  Synthetic Oligonucleotide
ggcaaucuccaaacauuga

SEQ ID NO: 378 - RNA, 19 nt, Artificial Sequence
  Synthetic Oligonucleotide
aaaccacaguggaccauau

SEQ ID NO: 379 - RNA, 19 nt, Artificial Sequence
  Synthetic Oligonucleotide
cagauaauaaagcuucucc

SEQ ID NO: 380 - RNA, 19 nt, Artificial Sequence
  Synthetic Oligonucleotide
aaccacaguggaccauaug

SEQ ID NO: 381 - RNA, 19 nt, Artificial Sequence
  Synthetic Oligonucleotide
cagaucgagugaugguauc

SEQ ID NO: 382 - RNA, 19 nt, Artificial Sequence
  Synthetic Oligonucleotide
ucagaucgagugaugguau

SEQ ID NO: 383 - RNA, 19 nt, Artificial Sequence
  Synthetic Oligonucleotide
aaaaaccacaguggaccau

SEQ ID NO: 384 - RNA, 19 nt, Artificial Sequence
  Synthetic Oligonucleotide
agaucgagugaugguauca

SEQ ID NO: 385 - RNA, 19 nt, Artificial Sequence
  Synthetic Oligonucleotide
caguuagaggugaccugaa

SEQ ID NO: 386 - RNA, 19 nt, Artificial Sequence
  Synthetic Oligonucleotide
uaaggcauuuucagaaaga

SEQ ID NO: 387 - RNA, 19 nt, Artificial Sequence
  Synthetic Oligonucleotide
gacauaaacccuggucaug

SEQ ID NO: 388 - RNA, 19 nt, Artificial Sequence
  Synthetic Oligonucleotide
aguuagaggugaccugaau

SEQ ID NO: 389 - RNA, 19 nt, Artificial Sequence
  Synthetic Oligonucleotide
gcaguuagaggugaccuga

SEQ ID NO: 390 - RNA, 19 nt, Artificial Sequence
  Synthetic Oligonucleotide
aggcauuuucagaaagaug

SEQ ID NO: 391 - RNA, 19 nt, Artificial Sequence
  Synthetic Oligonucleotide
aaggcauuuucagaaagau

SEQ ID NO: 392 - RNA, 19 nt, Artificial Sequence
  Synthetic Oligonucleotide
acauaaacccuggucaugc

SEQ ID NO: 393 - RNA, 19 nt, Artificial Sequence
  Synthetic Oligonucleotide
ggcauuuucagaaagaugc

SEQ ID NO: 394 - RNA, 19 nt, Artificial Sequence
  Synthetic Oligonucleotide
gaggauugcaugauaaaag

SEQ ID NO: 395 - RNA, 19 nt, Artificial Sequence
  Synthetic Oligonucleotide
aggauugcaugauaaaagc

SEQ ID NO: 396 - RNA, 19 nt, Artificial Sequence
  Synthetic Oligonucleotide
accacccagauaauaaagc

SEQ ID NO: 397 - RNA, 19 nt, Artificial Sequence
  Synthetic Oligonucleotide
ccacccagauaauaaagcu

SEQ ID NO: 398 - RNA, 19 nt, Artificial Sequence
  Synthetic Oligonucleotide
guacaacaaaauggaauuu

SEQ ID NO: 399 - RNA, 19 nt, Artificial Sequence
  Synthetic Oligonucleotide
gcaaucuccaaacauugaa

SEQ ID NO: 400 - RNA, 19 nt, Artificial Sequence
  Synthetic Oligonucleotide
uguacaacaaaauggaauu

SEQ ID NO: 401 - RNA, 19 nt, Artificial Sequence
  Synthetic Oligonucleotide
uuaaggcauuuucagaaag

SEQ ID NO: 402 - RNA, 19 nt, Artificial Sequence
  Synthetic Oligonucleotide
uaaacccuggucaugcaga

SEQ ID NO: 403 - RNA, 19 nt, Artificial Sequence
  Synthetic Oligonucleotide
aaagcaguuagaggugacc

SEQ ID NO: 404 - RNA, 19 nt, Artificial Sequence
  Synthetic Oligonucleotide
aagcaguuagaggugaccu

SEQ ID NO: 405 - RNA, 19 nt, Artificial Sequence
  Synthetic Oligonucleotide
agcaguuagaggugaccug

SEQ ID NO: 406 - RNA, 19 nt, Artificial Sequence
  Synthetic Oligonucleotide
auaaacccuggucaugcag

SEQ ID NO: 407 - RNA, 19 nt, Artificial Sequence
  Synthetic Oligonucleotide
aaaagcaguuagaggugac

SEQ ID NO: 408 - RNA, 19 nt, Artificial Sequence
  Synthetic Oligonucleotide
uuuaaggcauuuucagaaa

SEQ ID NO: 409 - RNA, 19 nt, Artificial Sequence
  Synthetic Oligonucleotide
ccagauaauaaagcuucuc

SEQ ID NO: 410 - RNA, 19 nt, Artificial Sequence
  Synthetic Oligonucleotide
guguuuucacaagaggauu

SEQ ID NO: 411 - RNA, 19 nt, Artificial Sequence
  Synthetic Oligonucleotide
uguuuucacaagaggauug

SEQ ID NO: 412 - RNA, 19 nt, Artificial Sequence
  Synthetic Oligonucleotide
ggauugcaugauaaaagca

SEQ ID NO: 413 - RNA, 19 nt, Artificial Sequence
  Synthetic Oligonucleotide
cccagauaauaaagcuucu

SEQ ID NO: 414 - RNA, 19 nt, Artificial Sequence
  Synthetic Oligonucleotide
acccagauaauaaagcuuc

SEQ ID NO: 415 - RNA, 19 nt, Artificial Sequence
  Synthetic Oligonucleotide
uuguacaacaaaauggaau

SEQ ID NO: 416 - RNA, 19 nt, Artificial Sequence
  Synthetic Oligonucleotide
caagaggauugcaugauaa

SEQ ID NO: 417 - RNA, 19 nt, Artificial Sequence
  Synthetic Oligonucleotide
aagaggauugcaugauaaa

SEQ ID NO: 418 - RNA, 19 nt, Artificial Sequence
  Synthetic Oligonucleotide
cauaaacccuggucaugca

SEQ ID NO: 419 - RNA, 19 nt, Artificial Sequence
  Synthetic Oligonucleotide
uguugguaaugaaacgaaa

SEQ ID NO: 420 - RNA, 19 nt, Artificial Sequence
  Synthetic Oligonucleotide
cacaagaggauugcaugau

SEQ ID NO: 421 - RNA, 19 nt, Artificial Sequence
  Synthetic Oligonucleotide
cacccagauaauaaagcuu

SEQ ID NO: 422 - RNA, 19 nt, Artificial Sequence
  Synthetic Oligonucleotide
ucgagugaugguaucaccu

SEQ ID NO: 423 - RNA, 19 nt, Artificial Sequence
  Synthetic Oligonucleotide
guugguaaugaaacgaaaa

SEQ ID NO: 424 - RNA, 19 nt, Artificial Sequence
  Synthetic Oligonucleotide
ucacaagaggauugcauga

SEQ ID NO: 425 - RNA, 19 nt, Artificial Sequence
  Synthetic Oligonucleotide
uguuguacaacaaaaugga

SEQ ID NO: 426 - RNA, 19 nt, Artificial Sequence
  Synthetic Oligonucleotide
guguugguaaugaaacgaa

SEQ ID NO: 427 - RNA, 19 nt, Artificial Sequence
  Synthetic Oligonucleotide
guuguacaacaaaauggaa

SEQ ID NO: 428 - RNA, 19 nt, Artificial Sequence
  Synthetic Oligonucleotide
uuucacaagaggauugcau

SEQ ID NO: 429 - RNA, 19 nt, Artificial Sequence
  Synthetic Oligonucleotide
auguuguacaacaaaaugg

SEQ ID NO: 430 - RNA, 19 nt, Artificial Sequence
  Synthetic Oligonucleotide
ggcaauucuccuguauuca

SEQ ID NO: 431 - RNA, 19 nt, Artificial Sequence
  Synthetic Oligonucleotide
uucacaagaggauugcaug

SEQ ID NO: 432 - RNA, 19 nt, Artificial Sequence
  Synthetic Oligonucleotide
uuuucacaagaggauugca

SEQ ID NO: 433 - RNA, 19 nt, Artificial Sequence
  Synthetic Oligonucleotide
guuuucacaagaggauugc

SEQ ID NO: 434 - RNA, 19 nt, Artificial Sequence
  Synthetic Oligonucleotide
gcaauucuccuguauucaa

SEQ ID NO: 435 - RNA, 19 nt, Artificial Sequence
  Synthetic Oligonucleotide
acaagaggauugcaugaua

SEQ ID NO: 436 - RNA, 19 nt, Artificial Sequence
  Synthetic Oligonucleotide
gggacaaggaugguggaca

SEQ ID NO: 437 - RNA, 19 nt, Artificial Sequence
  Synthetic Oligonucleotide
ggacaaggaugguggacau

SEQ ID NO: 438 - RNA, 19 nt, Artificial Sequence
  Synthetic Oligonucleotide
gacaggaaaagaacccguc

SEQ ID NO: 439 - RNA, 19 nt, Artificial Sequence
  Synthetic Oligonucleotide
uucacaaugguggggaaaa

SEQ ID NO: 440 - RNA, 19 nt, Artificial Sequence
  Synthetic Oligonucleotide
caaggaugguggacauucu

SEQ ID NO: 441 - RNA, 19 nt, Artificial Sequence
  Synthetic Oligonucleotide
agacaggaaaagaacccgu

SEQ ID NO: 442 - RNA, 19 nt, Artificial Sequence
  Synthetic Oligonucleotide
agaggauugcaugauaaaa

SEQ ID NO: 443 - RNA, 19 nt, Artificial Sequence
  Synthetic Oligonucleotide
caauguuguacaacaaaau

SEQ ID NO: 444 - RNA, 19 nt, Artificial Sequence
  Synthetic Oligonucleotide
aauguuguacaacaaaaug

SEQ ID NO: 445 - RNA, 19 nt, Artificial Sequence
  Synthetic Oligonucleotide
ucacaaugguggggaaaag

SEQ ID NO: 446 - RNA, 19 nt, Artificial Sequence
  Synthetic Oligonucleotide
acaaggaugguggacauuc

SEQ ID NO: 447 - RNA, 19 nt, Artificial Sequence
  Synthetic Oligonucleotide
caggaaaagaacccgucac

SEQ ID NO: 448 - RNA, 19 nt, Artificial Sequence
  Synthetic Oligonucleotide
acccuggucaugcagaccu

SEQ ID NO: 449 - RNA, 19 nt, Artificial Sequence
  Synthetic Oligonucleotide
aaacccuggucaugcagac

SEQ ID NO: 450 - RNA, 19 nt, Artificial Sequence
  Synthetic Oligonucleotide
aacccuggucaugcagacc

SEQ ID NO: 451 - RNA, 19 nt, Artificial Sequence
  Synthetic Oligonucleotide
gaaaagaacccgucacuua

SEQ ID NO: 452 - RNA, 19 nt, Artificial Sequence
  Synthetic Oligonucleotide
aggaaaagaacccgucacu

SEQ ID NO: 453 - RNA, 19 nt, Artificial Sequence
  Synthetic Oligonucleotide
aaaagaacccgucacuuag

SEQ ID NO: 454 - RNA, 19 nt, Artificial Sequence
  Synthetic Oligonucleotide
ggaaaagaacccgucacuu

SEQ ID NO: 455 - RNA, 19 nt, Artificial Sequence
  Synthetic Oligonucleotide
acaggaaaagaacccguca

SEQ ID NO: 456 - RNA, 19 nt, Artificial Sequence
  Synthetic Oligonucleotide
augcagaccucagugccaa

SEQ ID NO: 457 - RNA, 19 nt, Artificial Sequence
  Synthetic Oligonucleotide
ugguguuuucacaagagga

SEQ ID NO: 458 - RNA, 19 nt, Artificial Sequence
  Synthetic Oligonucleotide
augguguuuucacaagagg

SEQ ID NO: 459 - RNA, 19 nt, Artificial Sequence
  Synthetic Oligonucleotide
caugcagaccucagugcca

SEQ ID NO: 460 - RNA, 19 nt, Artificial Sequence
  Synthetic Oligonucleotide
ggaguaaaaugagugaugc

SEQ ID NO: 461 - RNA, 19 nt, Artificial Sequence
  Synthetic Oligonucleotide
uggaguaaaaugagugaug

SEQ ID NO: 462 - RNA, 19 nt, Artificial Sequence
  Synthetic Oligonucleotide
auucuccuguauucaacua

SEQ ID NO: 463 - RNA, 19 nt, Artificial Sequence
  Synthetic Oligonucleotide
gguguuuucacaagaggau

SEQ ID NO: 464 - RNA, 19 nt, Artificial Sequence
  Synthetic Oligonucleotide
aauucuccuguauucaacu

SEQ ID NO: 465 - RNA, 19 nt, Artificial Sequence
  Synthetic Oligonucleotide
augaugaugggcauguuca

SEQ ID NO: 466 - RNA, 19 nt, Artificial Sequence
  Synthetic Oligonucleotide
ugaugaugggcauguucaa

SEQ ID NO: 467 - RNA, 19 nt, Artificial Sequence
  Synthetic Oligonucleotide
gaucuguuccaccauugaa

SEQ ID NO: 468 - RNA, 19 nt, Artificial Sequence
  Synthetic Oligonucleotide
gaagaucuguuccaccauu

SEQ ID NO: 469 - RNA, 19 nt, Artificial Sequence
  Synthetic Oligonucleotide
aucuguuccaccauugaag

SEQ ID NO: 470 - RNA, 19 nt, Artificial Sequence
  Synthetic Oligonucleotide
ucuguuccaccauugaaga

SEQ ID NO: 471 - RNA, 19 nt, Artificial Sequence
  Synthetic Oligonucleotide
aagaucuguuccaccauug

SEQ ID NO: 472 - RNA, 19 nt, Artificial Sequence
  Synthetic Oligonucleotide
agaucuguuccaccauuga

SEQ ID NO: 473 - RNA, 19 nt, Artificial Sequence
  Synthetic Oligonucleotide
ugaagaucuguuccaccau

SEQ ID NO: 474 - RNA, 19 nt, Artificial Sequence
  Synthetic Oligonucleotide
gagaucaugaagaucuguu

SEQ ID NO: 475 - RNA, 19 nt, Artificial Sequence
  Synthetic Oligonucleotide
caugaagaucuguuccacc

SEQ ID NO: 476 - RNA, 19 nt, Artificial Sequence
  Synthetic Oligonucleotide
augaagaucuguuccacca

SEQ ID NO: 477 - RNA, 19 nt, Artificial Sequence
  Synthetic Oligonucleotide
ucaugaagaucuguuccac

SEQ ID NO: 478 - RNA, 19 nt, Artificial Sequence
  Synthetic Oligonucleotide
aucaugaagaucuguucca

SEQ ID NO: 479 - RNA, 19 nt, Artificial Sequence
  Synthetic Oligonucleotide
agaucaugaagaucuguuc

SEQ ID NO: 480 - RNA, 19 nt, Artificial Sequence
  Synthetic Oligonucleotide
gaucaugaagaucuguucc

SEQ ID NO: 481 - RNA, 19 nt, Artificial Sequence
  Synthetic Oligonucleotide
gaugaugggcauguucaac

SEQ ID NO: 482 - RNA, 19 nt, Artificial Sequence
  Synthetic Oligonucleotide
augaugggcauguucaaca

SEQ ID NO: 483 - RNA, 19 nt, Artificial Sequence
  Synthetic Oligonucleotide
gaugggcauguucaacaug

SEQ ID NO: 484 - RNA, 19 nt, Artificial Sequence
  Synthetic Oligonucleotide
ugaugggcauguucaacau

SEQ ID NO: 485 - RNA, 19 nt, Artificial Sequence
  Synthetic Oligonucleotide
ccauacagccauggaacag

SEQ ID NO: 486 - RNA, 19 nt, Artificial Sequence
  Synthetic Oligonucleotide
cauacagccauggaacagg

SEQ ID NO: 487 - RNA, 19 nt, Artificial Sequence
  Synthetic Oligonucleotide
ugauaaacaaugaccuugg

SEQ ID NO: 488 - RNA, 19 nt, Artificial Sequence
  Synthetic Oligonucleotide
augauaaacaaugaccuug

SEQ ID NO: 489 - RNA, 19 nt, Artificial Sequence
  Synthetic Oligonucleotide
augggcauguucaacaugc

SEQ ID NO: 490 - RNA, 19 nt, Artificial Sequence
  Synthetic Oligonucleotide
ugggcauguucaacaugcu

SEQ ID NO: 491 - RNA, 19 nt, Artificial Sequence
  Synthetic Oligonucleotide
caugagggaauacaagcag

SEQ ID NO: 492 - RNA, 19 nt, Artificial Sequence
  Synthetic Oligonucleotide
augagggaauacaagcagg

SEQ ID NO: 493 - RNA, 19 nt, Artificial Sequence
  Synthetic Oligonucleotide
gaggccauggugucuaggg

SEQ ID NO: 494 - RNA, 19 nt, Artificial Sequence
  Synthetic Oligonucleotide
ucacacaaagaacaauagg

SEQ ID NO: 495 - RNA, 19 nt, Artificial Sequence
  Synthetic Oligonucleotide
aggccauggugucuagggc

SEQ ID NO: 496 - RNA, 19 nt, Artificial Sequence
  Synthetic Oligonucleotide
uggaggccauggugucuag

SEQ ID NO: 497 - RNA, 19 nt, Artificial Sequence
  Synthetic Oligonucleotide
uggucacacaaagaacaau

SEQ ID NO: 498 - RNA, 19 nt, Artificial Sequence
  Synthetic Oligonucleotide
ggaggccauggugucuagg

SEQ ID NO: 499 - RNA, 19 nt, Artificial Sequence
  Synthetic Oligonucleotide
gucacacaaagaacaauag

SEQ ID NO: 500 - RNA, 19 nt, Artificial Sequence
  Synthetic Oligonucleotide
auggucacacaaagaacaa

SEQ ID NO: 501 - RNA, 19 nt, Artificial Sequence
  Synthetic Oligonucleotide
ggucacacaaagaacaaua

SEQ ID NO: 502 - RNA, 19 nt, Artificial Sequence
  Synthetic Oligonucleotide
uugaggaugaacagaugua

SEQ ID NO: 503 - RNA, 19 nt, Artificial Sequence
  Synthetic Oligonucleotide
gcaugguggaggccauggu

SEQ ID NO: 504 - RNA, 19 nt, Artificial Sequence
  Synthetic Oligonucleotide
cuugaggaugaacagaugu

SEQ ID NO: 505 - RNA, 19 nt, Artificial Sequence
  Synthetic Oligonucleotide
agcaugguggaggccaugg

SEQ ID NO: 506 - RNA, 19 nt, Artificial Sequence
  Synthetic Oligonucleotide
aucaugagggaauacaagc

SEQ ID NO: 507 - RNA, 19 nt, Artificial Sequence
  Synthetic Oligonucleotide
ucaugagggaauacaagca

SEQ ID NO: 508 - RNA, 19 nt, Artificial Sequence
  Synthetic Oligonucleotide
gaauucuugaggaugaaca

SEQ ID NO: 509 - RNA, 19 nt, Artificial Sequence
  Synthetic Oligonucleotide
uucuugaggaugaacagau

SEQ ID NO: 510 - RNA, 19 nt, Artificial Sequence
  Synthetic Oligonucleotide
ggaauucuugaggaugaac

SEQ ID NO: 511 - RNA, 19 nt, Artificial Sequence
  Synthetic Oligonucleotide
auucuugaggaugaacaga

SEQ ID NO: 512 - RNA, 19 nt, Artificial Sequence
  Synthetic Oligonucleotide
ucuugaggaugaacagaug

SEQ ID NO: 513 - RNA, 19 nt, Artificial Sequence
  Synthetic Oligonucleotide
gccauggugucuagggccc

SEQ ID NO: 514 - RNA, 19 nt, Artificial Sequence
  Synthetic Oligonucleotide
ggccauggugucuagggcc

SEQ ID NO: 515 - RNA, 19 nt, Artificial Sequence
  Synthetic Oligonucleotide
ccauggugucuagggcccg

SEQ ID NO: 516 - RNA, 19 nt, Artificial Sequence
  Synthetic Oligonucleotide
cuccauacagccauggaac

SEQ ID NO: 517 - RNA, 19 nt, Artificial Sequence
  Synthetic Oligonucleotide
ccuccauacagccauggaa

SEQ ID NO: 518 - RNA, 19 nt, Artificial Sequence
  Synthetic Oligonucleotide
uccauacagccauggaaca

SEQ ID NO: 519 - RNA, 19 nt, Artificial Sequence
  Synthetic Oligonucleotide
agggaauacaagcaggagu

SEQ ID NO: 520 - RNA, 19 nt, Artificial Sequence
  Synthetic Oligonucleotide
auacaagcaggaguggaua

SEQ ID NO: 521 - RNA, 19 nt, Artificial Sequence
  Synthetic Oligonucleotide
gagggaauacaagcaggag

SEQ ID NO: 522 - RNA, 19 nt, Artificial Sequence
  Synthetic Oligonucleotide
ugaccaagaaaauggucac

SEQ ID NO: 523 - RNA, 19 nt, Artificial Sequence
  Synthetic Oligonucleotide
uacaagcaggaguggauag

SEQ ID NO: 524 - RNA, 19 nt, Artificial Sequence
  Synthetic Oligonucleotide
ugguggaggccaugguguc

SEQ ID NO: 525 - RNA, 19 nt, Artificial Sequence
  Synthetic Oligonucleotide
augaccaagaaaaugguca

SEQ ID NO: 526 - RNA, 19 nt, Artificial Sequence
  Synthetic Oligonucleotide
augguggaggccauggugu

SEQ ID NO: 527 - RNA, 19 nt, Artificial Sequence
  Synthetic Oligonucleotide
aaucaugagggaauacaag

SEQ ID NO: 528 - RNA, 19 nt, Artificial Sequence
  Synthetic Oligonucleotide
accaagaaaauggucacac

SEQ ID NO: 529 - RNA, 19 nt, Artificial Sequence
  Synthetic Oligonucleotide
ugagggaauacaagcagga

SEQ ID NO: 530 - RNA, 19 nt, Artificial Sequence
  Synthetic Oligonucleotide
ccaagaaaauggucacaca

SEQ ID NO: 531 - RNA, 19 nt, Artificial Sequence
  Synthetic Oligonucleotide
caagaaaauggucacacaa

SEQ ID NO: 532 - RNA, 19 nt, Artificial Sequence
  Synthetic Oligonucleotide
guggaggccauggugucua

SEQ ID NO: 533 - RNA, 19 nt, Artificial Sequence
  Synthetic Oligonucleotide
gaccaagaaaauggucaca

SEQ ID NO: 534 - RNA, 19 nt, Artificial Sequence
  Synthetic Oligonucleotide
gguggaggccauggugucu

SEQ ID NO: 535 - RNA, 19 nt, Artificial Sequence
  Synthetic Oligonucleotide
caugguggaggccauggug

SEQ ID NO: 536 - RNA, 19 nt, Artificial Sequence
  Synthetic Oligonucleotide
aauucuugaggaugaacag

SEQ ID NO: 537 - RNA, 19 nt, Artificial Sequence
  Synthetic Oligonucleotide
aauggucacacaaagaaca

SEQ ID NO: 538 - RNA, 19 nt, Artificial Sequence
  Synthetic Oligonucleotide
uugauggaccacuaccuga

SEQ ID NO: 539 - RNA, 19 nt, Artificial Sequence
  Synthetic Oligonucleotide
gggaauacaagcaggagug

SEQ ID NO: 540 - RNA, 19 nt, Artificial Sequence
  Synthetic Oligonucleotide
acaugaccaagaaaauggu

SEQ ID NO: 541 - RNA, 19 nt, Artificial Sequence
  Synthetic Oligonucleotide
caugaccaagaaaaugguc

SEQ ID NO: 542 - RNA, 19 nt, Artificial Sequence
  Synthetic Oligonucleotide
aauacaagcaggaguggau

SEQ ID NO: 543 - RNA, 19 nt, Artificial Sequence
  Synthetic Oligonucleotide
auugauggaccacuaccug

SEQ ID NO: 544 - RNA, 19 nt, Artificial Sequence
  Synthetic Oligonucleotide
ggaauacaagcaggagugg

SEQ ID NO: 545 - RNA, 19 nt, Artificial Sequence
  Synthetic Oligonucleotide
gaauacaagcaggagugga

SEQ ID NO: 546 - RNA, 19 nt, Artificial Sequence
  Synthetic Oligonucleotide
caacaugaccaagaaaaug

SEQ ID NO: 547 - RNA, 19 nt, Artificial Sequence
  Synthetic Oligonucleotide
acaacaugaccaagaaaau

SEQ ID NO: 548 - RNA, 19 nt, Artificial Sequence
  Synthetic Oligonucleotide
gacaacaugaccaagaaaa

SEQ ID NO: 549 - RNA, 19 nt, Artificial Sequence
  Synthetic Oligonucleotide
aacaugaccaagaaaaugg

SEQ ID NO: 550 - RNA, 19 nt, Artificial Sequence
  Synthetic Oligonucleotide
aggggaauucuugaggaug

SEQ ID NO: 551 - RNA, 19 nt, Artificial Sequence
  Synthetic Oligonucleotide
ggggaauucuugaggauga

SEQ ID NO: 552 - RNA, 19 nt, Artificial Sequence
  Synthetic Oligonucleotide
aaauggucacacaaagaac

SEQ ID NO: 553 - RNA, 19 nt, Artificial Sequence
  Synthetic Oligonucleotide
gggaauucuugaggaugaa

SEQ ID NO: 554 - RNA, 19 nt, Artificial Sequence
  Synthetic Oligonucleotide
aaaauggucacacaaagaa

SEQ ID NO: 555 - RNA, 19 nt, Artificial Sequence
  Synthetic Oligonucleotide
agaaaauggucacacaaag

SEQ ID NO: 556 - RNA, 19 nt, Artificial Sequence
  Synthetic Oligonucleotide
aagaaaauggucacacaaa

SEQ ID NO: 557 - RNA, 19 nt, Artificial Sequence
  Synthetic Oligonucleotide
cugagaucaugaagaucug

SEQ ID NO: 558 - RNA, 19 nt, Artificial Sequence
  Synthetic Oligonucleotide
ugagaucaugaagaucugu

SEQ ID NO: 559 - RNA, 19 nt, Artificial Sequence
  Synthetic Oligonucleotide
ugaauggaugucaauccga

SEQ ID NO: 560 - RNA, 19 nt, Artificial Sequence
  Synthetic Oligonucleotide
ggcuaauagauuuccucaa

SEQ ID NO: 561 - RNA, 19 nt, Artificial Sequence
  Synthetic Oligonucleotide
gaauggaugucaauccgac

SEQ ID NO: 562 - RNA, 19 nt, Artificial Sequence
  Synthetic Oligonucleotide
gaaaauggucacacaaaga

SEQ ID NO: 563 - RNA, 19 nt, Artificial Sequence
  Synthetic Oligonucleotide
uugaauggaugucaauccg

SEQ ID NO: 564 - RNA, 19 nt, Artificial Sequence
  Synthetic Oligonucleotide
uguucucaaacaaaauggc

SEQ ID NO: 565 - RNA, 19 nt, Artificial Sequence
  Synthetic Oligonucleotide
auguucucaaacaaaaugg

SEQ ID NO: 566 - RNA, 19 nt, Artificial Sequence
  Synthetic Oligonucleotide
uaauagauuuccucaagga

SEQ ID NO: 567 - RNA, 19 nt, Artificial Sequence
  Synthetic Oligonucleotide
aauguucucaaacaaaaug

SEQ ID NO: 568 - RNA, 19 nt, Artificial Sequence
  Synthetic Oligonucleotide
auaauguucucaaacaaaa

SEQ ID NO: 569 - RNA, 19 nt, Artificial Sequence
  Synthetic Oligonucleotide
uaauguucucaaacaaaau

SEQ ID NO: 570 - RNA, 19 nt, Artificial Sequence
  Synthetic Oligonucleotide
cuaauagauuuccucaagg

SEQ ID NO: 571 - RNA, 19 nt, Artificial Sequence
  Synthetic Oligonucleotide
uagauuuccucaaggaugu

SEQ ID NO: 572 - RNA, 19 nt, Artificial Sequence
  Synthetic Oligonucleotide
auagauuuccucaaggaug

SEQ ID NO: 573 - RNA, 19 nt, Artificial Sequence
  Synthetic Oligonucleotide
uuugaauggaugucaaucc

SEQ ID NO: 574 - RNA, 19 nt, Artificial Sequence
  Synthetic Oligonucleotide
aauagauuuccucaaggau

SEQ ID NO: 575 - RNA, 19 nt, Artificial Sequence
  Synthetic Oligonucleotide
gcuaauagauuuccucaag

SEQ ID NO: 576 - RNA, 19 nt, Artificial Sequence
  Synthetic Oligonucleotide
aaaggggaauucuugagga

SEQ ID NO: 577 - RNA, 19 nt, Artificial Sequence
  Synthetic Oligonucleotide
caaaggggaauucuugagg

SEQ ID NO: 578 - RNA, 19 nt, Artificial Sequence
  Synthetic Oligonucleotide
aaggggaauucuugaggau

SEQ ID NO: 579 - RNA, 19 nt, Artificial Sequence
  Synthetic Oligonucleotide
aagaaaauugagaaaauaa

SEQ ID NO: 580 - RNA, 19 nt, Artificial Sequence
  Synthetic Oligonucleotide
agaaaauugagaaaauaag

SEQ ID NO: 581 - RNA, 19 nt, Artificial Sequence
  Synthetic Oligonucleotide
auuuccucaaggaugugau

SEQ ID NO: 582 - RNA, 19 nt, Artificial Sequence
  Synthetic Oligonucleotide
agauuuccucaaggaugug

SEQ ID NO: 583 - RNA, 19 nt, Artificial Sequence
  Synthetic Oligonucleotide
gauuuccucaaggauguga

SEQ ID NO: 584 - RNA, 19 nt, Artificial Sequence
  Synthetic Oligonucleotide
auuugaauggaugucaauc

SEQ ID NO: 585 - RNA, 19 nt, Artificial Sequence
  Synthetic Oligonucleotide
ugauggaccacuaccugag

SEQ ID NO: 586 - RNA, 19 nt, Artificial Sequence
  Synthetic Oligonucleotide
ccacuaccugaggauaaug

SEQ ID NO: 587 - RNA, 19 nt, Artificial Sequence
  Synthetic Oligonucleotide
uccuugaagaaucccaccc

SEQ ID NO: 588 - RNA, 19 nt, Artificial Sequence
  Synthetic Oligonucleotide
uuccuugaagaaucccacc

SEQ ID NO: 589 - RNA, 19 nt, Artificial Sequence
  Synthetic Oligonucleotide
uugaagaaucccacccagg

SEQ ID NO: 590 - RNA, 19 nt, Artificial Sequence
  Synthetic Oligonucleotide
cuugaagaaucccacccag

SEQ ID NO: 591 - RNA, 19 nt, Artificial Sequence
  Synthetic Oligonucleotide
cacuaccugaggauaauga

SEQ ID NO: 592 - RNA, 19 nt, Artificial Sequence
  Synthetic Oligonucleotide
ccuugaagaaucccaccca

SEQ ID NO: 593 - RNA, 19 nt, Artificial Sequence
  Synthetic Oligonucleotide
gauggaccacuaccugagg

SEQ ID NO: 594 - RNA, 19 nt, Artificial Sequence
  Synthetic Oligonucleotide
uggacacagucaacagaac

SEQ ID NO: 595 - RNA, 19 nt, Artificial Sequence
  Synthetic Oligonucleotide
auggacacagucaacagaa

SEQ ID NO: 596 - RNA, 19 nt, Artificial Sequence
  Synthetic Oligonucleotide
auggaccacuaccugagga

SEQ ID NO: 597 - RNA, 19 nt, Artificial Sequence
  Synthetic Oligonucleotide
acauucccuuauacuggag

SEQ ID NO: 598 - RNA, 19 nt, Artificial Sequence
  Synthetic Oligonucleotide
cauucccuuauacuggaga

SEQ ID NO: 599 - RNA, 19 nt, Artificial Sequence
  Synthetic Oligonucleotide
aaggaugugauggaaucaa

SEQ ID NO: 600 - RNA, 19 nt, Artificial Sequence
  Synthetic Oligonucleotide
aggaugugauggaaucaau

SEQ ID NO: 601 - RNA, 19 nt, Artificial Sequence
  Synthetic Oligonucleotide
guggauaugcacaaacaga

SEQ ID NO: 602 - RNA, 19 nt, Artificial Sequence
  Synthetic Oligonucleotide
uuccucaaggaugugaugg

SEQ ID NO: 603 - RNA, 19 nt, Artificial Sequence
  Synthetic Oligonucleotide
uuuccucaaggaugugaug

SEQ ID NO: 604 - RNA, 19 nt, Artificial Sequence
  Synthetic Oligonucleotide
aguggauaugcacaaacag

SEQ ID NO: 605 - RNA, 19 nt, Artificial Sequence
  Synthetic Oligonucleotide
gaggaugaacagauguacc

SEQ ID NO: 606 - RNA, 19 nt, Artificial Sequence
  Synthetic Oligonucleotide
aggaugaacagauguacca

SEQ ID NO: 607 - RNA, 19 nt, Artificial Sequence
  Synthetic Oligonucleotide
acacagucaacagaacaca

SEQ ID NO: 608 - RNA, 19 nt, Artificial Sequence
  Synthetic Oligonucleotide
ugaggaugaacagauguac

SEQ ID NO: 609 - RNA, 19 nt, Artificial Sequence
  Synthetic Oligonucleotide
gacacagucaacagaacac

SEQ ID NO: 610 - RNA, 19 nt, Artificial Sequence
  Synthetic Oligonucleotide
uccucaaggaugugaugga

SEQ ID NO: 611 - RNA, 19 nt, Artificial Sequence
  Synthetic Oligonucleotide
ggaccacuaccugaggaua

SEQ ID NO: 612 - RNA, 19 nt, Artificial Sequence
  Synthetic Oligonucleotide
ggacacagucaacagaaca

SEQ ID NO: 613 - RNA, 19 nt, Artificial Sequence
  Synthetic Oligonucleotide
ggaugugauggaaucaaug

SEQ ID NO: 614 - RNA, 19 nt, Artificial Sequence
  Synthetic Oligonucleotide
accacuaccugaggauaau

SEQ ID NO: 615 - RNA, 19 nt, Artificial Sequence
  Synthetic Oligonucleotide
gaccacuaccugaggauaa

SEQ ID NO: 616 - RNA, 19 nt, Artificial Sequence
  Synthetic Oligonucleotide
ccaguuuuggagugucugg

SEQ ID NO: 617 - RNA, 19 nt, Artificial Sequence
  Synthetic Oligonucleotide
uacaccauggacacaguca

SEQ ID NO: 618 - RNA, 19 nt, Artificial Sequence
  Synthetic Oligonucleotide
acaccauggacacagucaa

SEQ ID NO: 619 - RNA, 19 nt, Artificial Sequence
  Synthetic Oligonucleotide
auccuccauacagccaugg

SEQ ID NO: 620 - RNA, 19 nt, Artificial Sequence
  Synthetic Oligonucleotide
uggaccacuaccugaggau

SEQ ID NO: 621 - RNA, 19 nt, Artificial Sequence
  Synthetic Oligonucleotide
gauccuccauacagccaug

SEQ ID NO: 622 - RNA, 19 nt, Artificial Sequence
  Synthetic Oligonucleotide
cccaguuuuggagugucug

SEQ ID NO: 623 - RNA, 19 nt, Artificial Sequence
  Synthetic Oligonucleotide
augugauggaaucaaugga

SEQ ID NO: 624 - RNA, 19 nt, Artificial Sequence
  Synthetic Oligonucleotide
gaugugauggaaucaaugg

SEQ ID NO: 625 - RNA, 19 nt, Artificial Sequence
  Synthetic Oligonucleotide
gugauggaaucaauggaua

SEQ ID NO: 626 - RNA, 19 nt, Artificial Sequence
  Synthetic Oligonucleotide
uaccugaggauaaugagcc

SEQ ID NO: 627 - RNA, 19 nt, Artificial Sequence
  Synthetic Oligonucleotide
uggcaaauguugugagaaa

SEQ ID NO: 628 - RNA, 19 nt, Artificial Sequence
  Synthetic Oligonucleotide
aaugcaccaaaucaugagg

SEQ ID NO: 629 - RNA, 19 nt, Artificial Sequence
  Synthetic Oligonucleotide
augcaccaaaucaugaggg

SEQ ID NO: 630 - RNA, 19 nt, Artificial Sequence
  Synthetic Oligonucleotide
ugugauggaaucaauggau

SEQ ID NO: 631 - RNA, 19 nt, Artificial Sequence
  Synthetic Oligonucleotide
accauggacacagucaaca

SEQ ID NO: 632 - RNA, 19 nt, Artificial Sequence
  Synthetic Oligonucleotide
ugauggaaucaauggauaa

SEQ ID NO: 633 - RNA, 19 nt, Artificial Sequence
  Synthetic Oligonucleotide
ccauggacacagucaacag

SEQ ID NO: 634 - RNA, 19 nt, Artificial Sequence
  Synthetic Oligonucleotide
caccauggacacagucaac

SEQ ID NO: 635 - RNA, 19 nt, Artificial Sequence
  Synthetic Oligonucleotide
aauaugaugccguugcaac

SEQ ID NO: 636 - RNA, 19 nt, Artificial Sequence
  Synthetic Oligonucleotide
gaauaugaugccguugcaa

SEQ ID NO: 637 - RNA, 19 nt, Artificial Sequence
  Synthetic Oligonucleotide
augaugacuaauucacaag

SEQ ID NO: 638 - RNA, 19 nt, Artificial Sequence
  Synthetic Oligonucleotide
ugaugacuaauucacaaga

SEQ ID NO: 639 - RNA, 19 nt, Artificial Sequence
  Synthetic Oligonucleotide
uggaauaugaugccguugc

SEQ ID NO: 640 - RNA, 19 nt, Artificial Sequence
  Synthetic Oligonucleotide
uaacagugauaaagaacaa

SEQ ID NO: 641 - RNA, 19 nt, Artificial Sequence
  Synthetic Oligonucleotide
cauggacacagucaacaga

SEQ ID NO: 642 - RNA, 19 nt, Artificial Sequence
  Synthetic Oligonucleotide
uccuccauacagccaugga

SEQ ID NO: 643 - RNA, 19 nt, Artificial Sequence
  Synthetic Oligonucleotide
ggagauccuccauacagcc

SEQ ID NO: 644 - RNA, 19 nt, Artificial Sequence
  Synthetic Oligonucleotide
ggaauaugaugccguugca

SEQ ID NO: 645 - RNA, 19 nt, Artificial Sequence
  Synthetic Oligonucleotide
auggaauaugaugccguug

SEQ ID NO: 646 - RNA, 19 nt, Artificial Sequence
  Synthetic Oligonucleotide
agauccuccauacagccau

SEQ ID NO: 647 - RNA, 19 nt, Artificial Sequence
  Synthetic Oligonucleotide
gagauccuccauacagcca

SEQ ID NO: 648 - RNA, 19 nt, Artificial Sequence
  Synthetic Oligonucleotide
acuggagauccuccauaca

SEQ ID NO: 649 - RNA, 19 nt, Artificial Sequence
  Synthetic Oligonucleotide
uguucaacaugcuaaguac

SEQ ID NO: 650 - RNA, 19 nt, Artificial Sequence
  Synthetic Oligonucleotide
cuggagauccuccauacag

SEQ ID NO: 651 - RNA, 19 nt, Artificial Sequence
  Synthetic Oligonucleotide
auguucaacaugcuaagua

SEQ ID NO: 652 - RNA, 19 nt, Artificial Sequence
  Synthetic Oligonucleotide
uggagauccuccauacagc

SEQ ID NO: 653 - RNA, 19 nt, Artificial Sequence
  Synthetic Oligonucleotide
cucauagugaaugcaccaa

SEQ ID NO: 654 - RNA, 19 nt, Artificial Sequence
  Synthetic Oligonucleotide
cuaccugaggauaaugagc

SEQ ID NO: 655 - RNA, 19 nt, Artificial Sequence
  Synthetic Oligonucleotide
acuaccugaggauaaugag

SEQ ID NO: 656 - RNA, 19 nt, Artificial Sequence
  Synthetic Oligonucleotide
gcauguucaacaugcuaag

SEQ ID NO: 657 - RNA, 19 nt, Artificial Sequence
  Synthetic Oligonucleotide
gggcauguucaacaugcua

SEQ ID NO: 658 - RNA, 19 nt, Artificial Sequence
  Synthetic Oligonucleotide
ucauagugaaugcaccaaa

SEQ ID NO: 659 - RNA, 19 nt, Artificial Sequence
  Synthetic Oligonucleotide
ggcauguucaacaugcuaa

SEQ ID NO: 660 - RNA, 19 nt, Artificial Sequence
  Synthetic Oligonucleotide
auagugaaugcaccaaauc

SEQ ID NO: 661 - RNA, 19 nt, Artificial Sequence
  Synthetic Oligonucleotide
uagugaaugcaccaaauca

SEQ ID NO: 662 - RNA, 19 nt, Artificial Sequence
  Synthetic Oligonucleotide
aaaucaugagggaauacaa

SEQ ID NO: 663 - RNA, 19 nt, Artificial Sequence
  Synthetic Oligonucleotide
ugaaugcaccaaaucauga

SEQ ID NO: 664 - RNA, 19 nt, Artificial Sequence
  Synthetic Oligonucleotide
guaacagugauaaagaaca

SEQ ID NO: 665 - RNA, 19 nt, Artificial Sequence
  Synthetic Oligonucleotide
caaaucaugagggaauaca

SEQ ID NO: 666 - RNA, 19 nt, Artificial Sequence
  Synthetic Oligonucleotide
gugaaugcaccaaaucaug

SEQ ID NO: 667 - RNA, 19 nt, Artificial Sequence
  Synthetic Oligonucleotide
acaacaugauaaacaauga

SEQ ID NO: 668 - RNA, 19 nt, Artificial Sequence
  Synthetic Oligonucleotide
aacaacaugauaaacaaug

SEQ ID NO: 669 - RNA, 19 nt, Artificial Sequence
  Synthetic Oligonucleotide
agugaaugcaccaaaucau

SEQ ID NO: 670 - RNA, 19 nt, Artificial Sequence
  Synthetic Oligonucleotide
ugcaccaaaucaugaggga

SEQ ID NO: 671 - RNA, 19 nt, Artificial Sequence
  Synthetic Oligonucleotide
aagcaggaguggauagauu

SEQ ID NO: 672 - RNA, 19 nt, Artificial Sequence
  Synthetic Oligonucleotide
caagcaggaguggauagau

SEQ ID NO: 673 - RNA, 19 nt, Artificial Sequence
  Synthetic Oligonucleotide
caaggaugugauggaauca

SEQ ID NO: 674 - RNA, 19 nt, Artificial Sequence
  Synthetic Oligonucleotide
cauguucaacaugcuaagu

SEQ ID NO: 675 - RNA, 19 nt, Artificial Sequence
  Synthetic Oligonucleotide
ucaaggaugugauggaauc

SEQ ID NO: 676 - RNA, 19 nt, Artificial Sequence
  Synthetic Oligonucleotide
acaagcaggaguggauaga

SEQ ID NO: 677 - RNA, 19 nt, Artificial Sequence
  Synthetic Oligonucleotide
cucaaggaugugauggaau

SEQ ID NO: 678 - RNA, 19 nt, Artificial Sequence
  Synthetic Oligonucleotide
cauagugaaugcaccaaau

SEQ ID NO: 679 - RNA, 19 nt, Artificial Sequence
  Synthetic Oligonucleotide
uaaagaacaacaugauaaa

SEQ ID NO: 680 - RNA, 19 nt, Artificial Sequence
  Synthetic Oligonucleotide
caccaaaucaugagggaau

SEQ ID NO: 681 - RNA, 19 nt, Artificial Sequence
  Synthetic Oligonucleotide
gcaccaaaucaugagggaa

SEQ ID NO: 682 - RNA, 19 nt, Artificial Sequence
  Synthetic Oligonucleotide
auaaagaacaacaugauaa

SEQ ID NO: 683 - RNA, 19 nt, Artificial Sequence
  Synthetic Oligonucleotide
aagaacaacaugauaaaca

SEQ ID NO: 684 - RNA, 19 nt, Artificial Sequence
  Synthetic Oligonucleotide
accaaaucaugagggaaua

SEQ ID NO: 685 - RNA, 19 nt, Artificial Sequence
  Synthetic Oligonucleotide
aaagaacaacaugauaaac

SEQ ID NO: 686 - RNA, 19 nt, Artificial Sequence
  Synthetic Oligonucleotide
agaacaacaugauaaacaa

SEQ ID NO: 687 - RNA, 19 nt, Artificial Sequence
  Synthetic Oligonucleotide
ccaaaucaugagggaauac

SEQ ID NO: 688 - RNA, 19 nt, Artificial Sequence
  Synthetic Oligonucleotide
cagugauaaagaacaacau

SEQ ID NO: 689 - RNA, 19 nt, Artificial Sequence
  Synthetic Oligonucleotide
agugauaaagaacaacaug

SEQ ID NO: 690 - RNA, 19 nt, Artificial Sequence
  Synthetic Oligonucleotide
acagugauaaagaacaaca

SEQ ID NO: 691 - RNA, 19 nt, Artificial Sequence
  Synthetic Oligonucleotide
ugauaaagaacaacaugau

SEQ ID NO: 692 - RNA, 19 nt, Artificial Sequence
  Synthetic Oligonucleotide
gugauaaagaacaacauga

SEQ ID NO: 693 - RNA, 19 nt, Artificial Sequence
  Synthetic Oligonucleotide
gaacaacaugauaaacaau

SEQ ID NO: 694 - RNA, 19 nt, Artificial Sequence
  Synthetic Oligonucleotide
ugacuaauucacaagacac

SEQ ID NO: 695 - RNA, 19 nt, Artificial Sequence
  Synthetic Oligonucleotide
augacuaauucacaagaca

SEQ ID NO: 696 - RNA, 19 nt, Artificial Sequence
  Synthetic Oligonucleotide
gauaaagaacaacaugaua

SEQ ID NO: 697 - RNA, 19 nt, Artificial Sequence
  Synthetic Oligonucleotide
agccaaaggggaauucuug

SEQ ID NO: 698 - RNA, 19 nt, Artificial Sequence
  Synthetic Oligonucleotide
gccaaaggggaauucuuga

SEQ ID NO: 699 - RNA, 19 nt, Artificial Sequence
  Synthetic Oligonucleotide
gaugacuaauucacaagac

SEQ ID NO: 700 - RNA, 19 nt, Artificial Sequence
  Synthetic Oligonucleotide
gaaugcaccaaaucaugag

SEQ ID NO: 701 - RNA, 19 nt, Artificial Sequence
  Synthetic Oligonucleotide
aacagugauaaagaacaac

SEQ ID NO: 702 - RNA, 19 nt, Artificial Sequence
  Synthetic Oligonucleotide
uugcaacuacacacuccug

SEQ ID NO: 703 - RNA, 19 nt, Artificial Sequence
  Synthetic Oligonucleotide
ugcaacuacacacuccugg

SEQ ID NO: 704 - RNA, 19 nt, Artificial Sequence
  Synthetic Oligonucleotide
guugcaacuacacacuccu

SEQ ID NO: 705 - RNA, 19 nt, Artificial Sequence
  Synthetic Oligonucleotide
caggaguggauagauucua

SEQ ID NO: 706 - RNA, 19 nt, Artificial Sequence
  Synthetic Oligonucleotide
gcaacuacacacuccugga

SEQ ID NO: 707 - RNA, 19 nt, Artificial Sequence
  Synthetic Oligonucleotide
ccagcaacagcccagaugg

SEQ ID NO: 708 - RNA, 19 nt, Artificial Sequence
  Synthetic Oligonucleotide
cagcaacagcccagauggc

SEQ ID NO: 709 - RNA, 19 nt, Artificial Sequence
  Synthetic Oligonucleotide
agaacacaccaauauucag

SEQ ID NO: 710 - RNA, 19 nt, Artificial Sequence
  Synthetic Oligonucleotide
agaucauucgagcuaaaga

SEQ ID NO: 711 - RNA, 19 nt, Artificial Sequence
  Synthetic Oligonucleotide
gcaggaguggauagauucu

SEQ ID NO: 712 - RNA, 19 nt, Artificial Sequence
  Synthetic Oligonucleotide
caacuacacacuccuggau

SEQ ID NO: 713 - RNA, 19 nt, Artificial Sequence
  Synthetic Oligonucleotide
gaacacaccaauauucaga

SEQ ID NO: 714 - RNA, 19 nt, Artificial Sequence
  Synthetic Oligonucleotide
agcaggaguggauagauuc

SEQ ID NO: 715 - RNA, 19 nt, Artificial Sequence
  Synthetic Oligonucleotide
ucuagggcccggauugaug

SEQ ID NO: 716 - RNA, 19 nt, Artificial Sequence
  Synthetic Oligonucleotide
uggugucuagggcccggau

SEQ ID NO: 717 - RNA, 19 nt, Artificial Sequence
  Synthetic Oligonucleotide
auggugucuagggcccgga

SEQ ID NO: 718 - RNA, 19 nt, Artificial Sequence
  Synthetic Oligonucleotide
gauaugcacaaacagacug

SEQ ID NO: 719 - RNA, 19 nt, Artificial Sequence
  Synthetic Oligonucleotide
cuagggcccggauugaugc

SEQ ID NO: 720 - RNA, 19 nt, Artificial Sequence
  Synthetic Oligonucleotide
ggauaugcacaaacagacu

SEQ ID NO: 721 - RNA, 19 nt, Artificial Sequence
  Synthetic Oligonucleotide
ugucuagggcccggauuga

SEQ ID NO: 722 - RNA, 19 nt, Artificial Sequence
  Synthetic Oligonucleotide
cauggugucuagggcccgg

SEQ ID NO: 723 - RNA, 19 nt, Artificial Sequence
  Synthetic Oligonucleotide
aacaugauaaacaaugacc

SEQ ID NO: 724 - RNA, 19 nt, Artificial Sequence
  Synthetic Oligonucleotide
acaugauaaacaaugaccu

SEQ ID NO: 725 - RNA, 19 nt, Artificial Sequence
  Synthetic Oligonucleotide
ggaaggcuaauagauuucc

SEQ ID NO: 726 - RNA, 19 nt, Artificial Sequence
  Synthetic Oligonucleotide
gaaggcuaauagauuuccu

SEQ ID NO: 727 - RNA, 19 nt, Artificial Sequence
  Synthetic Oligonucleotide
gugucuagggcccggauug

SEQ ID NO: 728 - RNA, 19 nt, Artificial Sequence
  Synthetic Oligonucleotide
ggugucuagggcccggauu

SEQ ID NO: 729 - RNA, 19 nt, Artificial Sequence
  Synthetic Oligonucleotide
aacuacacacuccuggauu

SEQ ID NO: 730 - RNA, 19 nt, Artificial Sequence
  Synthetic Oligonucleotide
caacaugauaaacaaugac

SEQ ID NO: 731 - RNA, 19 nt, Artificial Sequence
  Synthetic Oligonucleotide
cagcgcaaaaugccauaag

SEQ ID NO: 732 - RNA, 19 nt, Artificial Sequence
  Synthetic Oligonucleotide
ucagcugauaugagcauug

SEQ ID NO: 733 - RNA, 19 nt, Artificial Sequence
  Synthetic Oligonucleotide
cagcugauaugagcauugg

SEQ ID NO: 734 - RNA, 19 nt, Artificial Sequence
  Synthetic Oligonucleotide
cuacacacuccuggauucc

SEQ ID NO: 735 - RNA, 19 nt, Artificial Sequence
  Synthetic Oligonucleotide
acuacacacuccuggauuc

SEQ ID NO: 736 - RNA, 19 nt, Artificial Sequence
  Synthetic Oligonucleotide
auuggaguaacagugauaa

SEQ ID NO: 737 - RNA, 19 nt, Artificial Sequence
  Synthetic Oligonucleotide
acagaacacaccaauauuc

SEQ ID NO: 738 - RNA, 19 nt, Artificial Sequence
  Synthetic Oligonucleotide
cagaacacaccaauauuca

SEQ ID NO: 739 - RNA, 19 nt, Artificial Sequence
  Synthetic Oligonucleotide
aacagaacacaccaauauu

SEQ ID NO: 740 - RNA, 19 nt, Artificial Sequence
  Synthetic Oligonucleotide
ggaccagcaacagcccaga

SEQ ID NO: 741 - RNA, 19 nt, Artificial Sequence
  Synthetic Oligonucleotide
accagcaacagcccagaug

SEQ ID NO: 742 - RNA, 19 nt, Artificial Sequence
  Synthetic Oligonucleotide
auugaugccagaauugacu

SEQ ID NO: 743 - RNA, 19 nt, Artificial Sequence
  Synthetic Oligonucleotide
gaucauucgagcuaaagaa

SEQ ID NO: 744 - RNA, 19 nt, Artificial Sequence
  Synthetic Oligonucleotide
uuggaguaacagugauaaa

SEQ ID NO: 745 - RNA, 19 nt, Artificial Sequence
  Synthetic Oligonucleotide
gaccagcaacagcccagau

SEQ ID NO: 746 - RNA, 19 nt, Artificial Sequence
  Synthetic Oligonucleotide
uugaugccagaauugacuu

SEQ ID NO: 747 - RNA, 19 nt, Artificial Sequence
  Synthetic Oligonucleotide
ucaacagaacacaccaaua

SEQ ID NO: 748 - RNA, 19 nt, Artificial Sequence
  Synthetic Oligonucleotide
gucaacagaacacaccaau

SEQ ID NO: 749 - RNA, 19 nt, Artificial Sequence
  Synthetic Oligonucleotide
agcugauaugagcauugga

SEQ ID NO: 750 - RNA, 19 nt, Artificial Sequence
  Synthetic Oligonucleotide
caacagaacacaccaauau

SEQ ID NO: 751 - RNA, 19 nt, Artificial Sequence
  Synthetic Oligonucleotide
cugauaugagcauuggagu

SEQ ID NO: 752 - RNA, 19 nt, Artificial Sequence
  Synthetic Oligonucleotide
ccaaaggggaauucuugag

SEQ ID NO: 753 - RNA, 19 nt, Artificial Sequence
  Synthetic Oligonucleotide
gcugauaugagcauuggag

SEQ ID NO: 754 - RNA, 19 nt, Artificial Sequence
  Synthetic Oligonucleotide
ccagcgcaaaaugccauaa

SEQ ID NO: 755 - RNA, 19 nt, Artificial Sequence
  Synthetic Oligonucleotide
augccagaauugacuucga

SEQ ID NO: 756 - RNA, 19 nt, Artificial Sequence
  Synthetic Oligonucleotide
gaugccagaauugacuucg

SEQ ID NO: 757 - RNA, 19 nt, Artificial Sequence
  Synthetic Oligonucleotide
gucuagggcccggauugau

SEQ ID NO: 758 - RNA, 19 nt, Artificial Sequence
  Synthetic Oligonucleotide
ccucaaggaugugauggaa

SEQ ID NO: 759 - RNA, 19 nt, Artificial Sequence
  Synthetic Oligonucleotide
ugagcauuggaguaacagu

SEQ ID NO: 760 - RNA, 19 nt, Artificial Sequence
  Synthetic Oligonucleotide
aggaguggauagauucuac

SEQ ID NO: 761 - RNA, 19 nt, Artificial Sequence
  Synthetic Oligonucleotide
augagcauuggaguaacag

SEQ ID NO: 762 - RNA, 19 nt, Artificial Sequence
  Synthetic Oligonucleotide
ugaugccagaauugacuuc

SEQ ID NO: 763 - RNA, 19 nt, Artificial Sequence
  Synthetic Oligonucleotide
ggaguaacagugauaaaga

SEQ ID NO: 764 - RNA, 19 nt, Artificial Sequence
  Synthetic Oligonucleotide
auaugagcauuggaguaac

SEQ ID NO: 765 - RNA, 19 nt, Artificial Sequence
  Synthetic Oligonucleotide
gauaugagcauuggaguaa

SEQ ID NO: 766 - RNA, 19 nt, Artificial Sequence
  Synthetic Oligonucleotide
gaguggauagauucuacag

SEQ ID NO: 767 - RNA, 19 nt, Artificial Sequence
  Synthetic Oligonucleotide
ggaguggauagauucuaca

SEQ ID NO: 768 - RNA, 19 nt, Artificial Sequence
  Synthetic Oligonucleotide
agggcccggauugaugcca

SEQ ID NO: 769 - RNA, 19 nt, Artificial Sequence
  Synthetic Oligonucleotide
uuggaccagcaacagccca

SEQ ID NO: 770 - RNA, 19 nt, Artificial Sequence
  Synthetic Oligonucleotide
cuuggaccagcaacagccc

SEQ ID NO: 771 - RNA, 19 nt, Artificial Sequence
  Synthetic Oligonucleotide
gggcccggauugaugccag

SEQ ID NO: 772 - RNA, 19 nt, Artificial Sequence
  Synthetic Oligonucleotide
gaguaacagugauaaagaa

SEQ ID NO: 773 - RNA, 19 nt, Artificial Sequence
  Synthetic Oligonucleotide
caugauaaacaaugaccuu

SEQ ID NO: 774 - RNA, 19 nt, Artificial Sequence
  Synthetic Oligonucleotide
cauuggaguaacagugaua

SEQ ID NO: 775 - RNA, 19 nt, Artificial Sequence
  Synthetic Oligonucleotide
ccagaauugacuucgaguc

SEQ ID NO: 776 - RNA, 19 nt, Artificial Sequence
  Synthetic Oligonucleotide
cagaauugacuucgagucu

SEQ ID NO: 777 - RNA, 19 nt, Artificial Sequence
  Synthetic Oligonucleotide
cccggauugaugccagaau

SEQ ID NO: 778 - RNA, 19 nt, Artificial Sequence
  Synthetic Oligonucleotide
ggcccggauugaugccaga

SEQ ID NO: 779 - RNA, 19 nt, Artificial Sequence
  Synthetic Oligonucleotide
agcauuggaguaacaguga

SEQ ID NO: 780 - RNA, 19 nt, Artificial Sequence
  Synthetic Oligonucleotide
uggauaugcacaaacagac

SEQ ID NO: 781 - RNA, 19 nt, Artificial Sequence
  Synthetic Oligonucleotide
gccagaauugacuucgagu

SEQ ID NO: 782 - RNA, 19 nt, Artificial Sequence
  Synthetic Oligonucleotide
uaugagcauuggaguaaca

SEQ ID NO: 783 - RNA, 19 nt, Artificial Sequence
  Synthetic Oligonucleotide
ugauaugagcauuggagua

SEQ ID NO: 784 - RNA, 19 nt, Artificial Sequence
  Synthetic Oligonucleotide
gcauuggaguaacagugau

SEQ ID NO: 785 - RNA, 19 nt, Artificial Sequence
  Synthetic Oligonucleotide
gaauugacuucgagucugg

SEQ ID NO: 786 - RNA, 19 nt, Artificial Sequence
  Synthetic Oligonucleotide
ccggauugaugccagaauu

SEQ ID NO: 787 - RNA, 19 nt, Artificial Sequence
  Synthetic Oligonucleotide
uagggcccggauugaugcc

SEQ ID NO: 788 - RNA, 19 nt, Artificial Sequence
  Synthetic Oligonucleotide
aguaacagugauaaagaac

SEQ ID NO: 789 - RNA, 19 nt, Artificial Sequence
  Synthetic Oligonucleotide
uggaguaacagugauaaag

SEQ ID NO: 790 - RNA, 19 nt, Artificial Sequence
  Synthetic Oligonucleotide
gcccggauugaugccagaa

SEQ ID NO: 791 - RNA, 19 nt, Artificial Sequence
  Synthetic Oligonucleotide
uugacuucgagucuggacg

SEQ ID NO: 792 - RNA, 19 nt, Artificial Sequence
  Synthetic Oligonucleotide
gagcauuggaguaacagug

SEQ ID NO: 793 - RNA, 19 nt, Artificial Sequence
  Synthetic Oligonucleotide
cauucgagcuaaagaagcu

SEQ ID NO: 794 - RNA, 19 nt, Artificial Sequence
  Synthetic Oligonucleotide
ucauucgagcuaaagaagc

SEQ ID NO: 795 - RNA, 19 nt, Artificial Sequence
  Synthetic Oligonucleotide
agaauugacuucgagucug

SEQ ID NO: 796 - RNA, 19 nt, Artificial Sequence
  Synthetic Oligonucleotide
ggauugaugccagaauuga

SEQ ID NO: 797 - RNA, 19 nt, Artificial Sequence
  Synthetic Oligonucleotide
gauugaugccagaauugac

SEQ ID NO: 798 - RNA, 19 nt, Artificial Sequence
  Synthetic Oligonucleotide
cggauugaugccagaauug

SEQ ID NO: 799 - RNA, 19 nt, Artificial Sequence
  Synthetic Oligonucleotide
auugagaaaauaaggccuc

SEQ ID NO: 800 - RNA, 19 nt, Artificial Sequence
  Synthetic Oligonucleotide
uugagaaaauaaggccucu

SEQ ID NO: 801 - RNA, 19 nt, Artificial Sequence
  Synthetic Oligonucleotide
aucauucgagcuaaagaag

SEQ ID NO: 802 - RNA, 19 nt, Artificial Sequence
  Synthetic Oligonucleotide
agccauggaacaggaacag

SEQ ID NO: 803 - RNA, 19 nt, Artificial Sequence
  Synthetic Oligonucleotide
gccauggaacaggaacagg

SEQ ID NO: 804 - RNA, 19 nt, Artificial Sequence
  Synthetic Oligonucleotide
uggaccagcaacagcccag

SEQ ID NO: 805 - RNA, 19 nt, Artificial Sequence
  Synthetic Oligonucleotide
auugacuucgagucuggac

SEQ ID NO: 806 - RNA, 19 nt, Artificial Sequence
  Synthetic Oligonucleotide
gaccuuggaccagcaacag

SEQ ID NO: 807 - RNA, 19 nt, Artificial Sequence
  Synthetic Oligonucleotide
accuuggaccagcaacagc

SEQ ID NO: 808 - RNA, 19 nt, Artificial Sequence
  Synthetic Oligonucleotide
gagcuaaagaagcuguggg

SEQ ID NO: 809 - RNA, 19 nt, Artificial Sequence
  Synthetic Oligonucleotide
acagccauggaacaggaac

SEQ ID NO: 810 - RNA, 19 nt, Artificial Sequence
  Synthetic Oligonucleotide
ugccagaauugacuucgag

SEQ ID NO: 811 - RNA, 19 nt, Artificial Sequence
  Synthetic Oligonucleotide
uacagccauggaacaggaa

SEQ ID NO: 812 - RNA, 19 nt, Artificial Sequence
  Synthetic Oligonucleotide
agcuaaagaagcuguggga

SEQ ID NO: 813 - RNA, 19 nt, Artificial Sequence
  Synthetic Oligonucleotide
accacauucccuuauacug

SEQ ID NO: 814 - RNA, 19 nt, Artificial Sequence
  Synthetic Oligonucleotide
ccacauucccuuauacugg

SEQ ID NO: 815 - RNA, 19 nt, Artificial Sequence
  Synthetic Oligonucleotide
uaugcacaaacagacugug

SEQ ID NO: 816 - RNA, 19 nt, Artificial Sequence
  Synthetic Oligonucleotide
caagccaaaggggaauucu

SEQ ID NO: 817 - RNA, 19 nt, Artificial Sequence
  Synthetic Oligonucleotide
augcacaaacagacugugu

SEQ ID NO: 818 - RNA, 19 nt, Artificial Sequence
  Synthetic Oligonucleotide
aauugacuucgagucugga

SEQ ID NO: 819 - RNA, 19 nt, Artificial Sequence
  Synthetic Oligonucleotide
gacuucgagucuggacgga

SEQ ID NO: 820 - RNA, 19 nt, Artificial Sequence
  Synthetic Oligonucleotide
cagccauggaacaggaaca

SEQ ID NO: 821 - RNA, 19 nt, Artificial Sequence
  Synthetic Oligonucleotide
acaagccaaaggggaauuc

SEQ ID NO: 822 - RNA, 19 nt, Artificial Sequence
  Synthetic Oligonucleotide
aagccaaaggggaauucuu

SEQ ID NO: 823 - RNA, 19 nt, Artificial Sequence
  Synthetic Oligonucleotide
acacacuccuggauuccca

SEQ ID NO: 824 - RNA, 19 nt, Artificial Sequence
  Synthetic Oligonucleotide
auacagccauggaacagga

SEQ ID NO: 825 - RNA, 19 nt, Artificial Sequence
  Synthetic Oligonucleotide
ugacuucgagucuggacgg

SEQ ID NO: 826 - RNA, 19 nt, Artificial Sequence
  Synthetic Oligonucleotide
auaugcacaaacagacugu

SEQ ID NO: 827 - RNA, 19 nt, Artificial Sequence
  Synthetic Oligonucleotide
acuucgagucuggacggau

SEQ ID NO: 828 - RNA, 19 nt, Artificial Sequence
  Synthetic Oligonucleotide
cacacuccuggauucccaa

SEQ ID NO: 829 - RNA, 19 nt, Artificial Sequence
  Synthetic Oligonucleotide
uccagcgcaaaaugccaua

SEQ ID NO: 830 - RNA, 19 nt, Artificial Sequence
  Synthetic Oligonucleotide
uuccagcgcaaaaugccau

SEQ ID NO: 831 - RNA, 19 nt, Artificial Sequence
  Synthetic Oligonucleotide
augauuacauauaucacaa

SEQ ID NO: 832 - RNA, 19 nt, Artificial Sequence
  Synthetic Oligonucleotide
acuccuggauucccaagag

SEQ ID NO: 833 - RNA, 19 nt, Artificial Sequence
  Synthetic Oligonucleotide
acacuccuggauucccaag

SEQ ID NO: 834 - RNA, 19 nt, Artificial Sequence
  Synthetic Oligonucleotide
cacuccuggauucccaaga

SEQ ID NO: 835 - RNA, 19 nt, Artificial Sequence
  Synthetic Oligonucleotide
aacacaagccaaaggggaa

SEQ ID NO: 836 - RNA, 19 nt, Artificial Sequence
  Synthetic Oligonucleotide
uacacacuccuggauuccc

SEQ ID NO: 837 - RNA, 19 nt, Artificial Sequence
  Synthetic Oligonucleotide
acacaagccaaaggggaau

SEQ ID NO: 838 - RNA, 19 nt, Artificial Sequence
  Synthetic Oligonucleotide
uggauucccaagaggaacc

SEQ ID NO: 839 - RNA, 19 nt, Artificial Sequence
  Synthetic Oligonucleotide
ugauuacauauaucacaaa

SEQ ID NO: 840 - RNA, 19 nt, Artificial Sequence
  Synthetic Oligonucleotide
ggauucccaagaggaaccg

SEQ ID NO: 841 - RNA, 19 nt, Artificial Sequence
  Synthetic Oligonucleotide
cuguuccaccauugaagaa

SEQ ID NO: 842 - RNA, 19 nt, Artificial Sequence
  Synthetic Oligonucleotide
cacaagccaaaggggaauu

SEQ ID NO: 843 - RNA, 19 nt, Artificial Sequence
  Synthetic Oligonucleotide
gauuacauauaucacaaaa

SEQ ID NO: 844 - RNA, 19 nt, Artificial Sequence
  Synthetic Oligonucleotide
uaagagacaacaugaccaa

SEQ ID NO: 845 - RNA, 19 nt, Artificial Sequence
  Synthetic Oligonucleotide
uuagagccuauguggaugg

SEQ ID NO: 846 - RNA, 19 nt, Artificial Sequence
  Synthetic Oligonucleotide
uuuagagccuauguggaug

SEQ ID NO: 847 - RNA, 19 nt, Artificial Sequence
  Synthetic Oligonucleotide
uugaggagugccugauuaa

SEQ ID NO: 848 - RNA, 19 nt, Artificial Sequence
  Synthetic Oligonucleotide
agagccuauguggauggau

SEQ ID NO: 849 - RNA, 19 nt, Artificial Sequence
  Synthetic Oligonucleotide
uagagccuauguggaugga

SEQ ID NO: 850 - RNA, 19 nt, Artificial Sequence
  Synthetic Oligonucleotide
gagccuauguggauggauu

SEQ ID NO: 851 - RNA, 19 nt, Artificial Sequence
  Synthetic Oligonucleotide
auugaggagugccugauua

SEQ ID NO: 852 - RNA, 19 nt, Artificial Sequence
  Synthetic Oligonucleotide
gcaauugaggagugccuga

SEQ ID NO: 853 - RNA, 19 nt, Artificial Sequence
  Synthetic Oligonucleotide
agcaauugaggagugccug

SEQ ID NO: 854 - RNA, 19 nt, Artificial Sequence
  Synthetic Oligonucleotide
caauugaggagugccugau

SEQ ID NO: 855 - RNA, 19 nt, Artificial Sequence
  Synthetic Oligonucleotide
aauugaggagugccugauu

SEQ ID NO: 856 - RNA, 19 nt, Artificial Sequence
  Synthetic Oligonucleotide
uauaugaagcaauugagga

SEQ ID NO: 857 - RNA, 19 nt, Artificial Sequence
  Synthetic Oligonucleotide
cuauaugaagcaauugagg

SEQ ID NO: 858 - RNA, 19 nt, Artificial Sequence
  Synthetic Oligonucleotide
gaagcaauugaggagugcc

SEQ ID NO: 859 - RNA, 19 nt, Artificial Sequence
  Synthetic Oligonucleotide
aagcaauugaggagugccu

SEQ ID NO: 860 - RNA, 19 nt, Artificial Sequence
  Synthetic Oligonucleotide
uaugaagcaauugaggagu

SEQ ID NO: 861 - RNA, 19 nt, Artificial Sequence
  Synthetic Oligonucleotide
augaagcaauugaggagug

SEQ ID NO: 862 - RNA, 19 nt, Artificial Sequence
  Synthetic Oligonucleotide
ugaagcaauugaggagugc

SEQ ID NO: 863 - RNA, 19 nt, Artificial Sequence
  Synthetic Oligonucleotide
auaugaagcaauugaggag

SEQ ID NO: 864 - RNA, 19 nt, Artificial Sequence
  Synthetic Oligonucleotide
gggcuauaugaagcaauug

SEQ ID NO: 865 - RNA, 19 nt, Artificial Sequence
  Synthetic Oligonucleotide
gcuauaugaagcaauugag

SEQ ID NO: 866 - RNA, 19 nt, Artificial Sequence
  Synthetic Oligonucleotide
ggcuauaugaagcaauuga

SEQ ID NO: 867 - RNA, 19 nt, Artificial Sequence
  Synthetic Oligonucleotide
ggcaagcuuucucaaaugu

SEQ ID NO: 868 - RNA, 19 nt, Artificial Sequence
  Synthetic Oligonucleotide
gcaagcuuucucaaauguc

SEQ ID NO: 869 - RNA, 19 nt, Artificial Sequence
  Synthetic Oligonucleotide
uugagggcaagcuuucuca

SEQ ID NO: 870 - RNA, 19 nt, Artificial Sequence
  Synthetic Oligonucleotide
auugagggcaagcuuucuc

SEQ ID NO: 871 - RNA, 19 nt, Artificial Sequence
  Synthetic Oligonucleotide
cauugagggcaagcuuucu

SEQ ID NO: 872 - RNA, 19 nt, Artificial Sequence
  Synthetic Oligonucleotide
gggcaagcuuucucaaaug

SEQ ID NO: 873 - RNA, 19 nt, Artificial Sequence
  Synthetic Oligonucleotide
agggcaagcuuucucaaau

SEQ ID NO: 874 - RNA, 19 nt, Artificial Sequence
  Synthetic Oligonucleotide
gagggcaagcuuucucaaa

SEQ ID NO: 875 - RNA, 19 nt, Artificial Sequence
  Synthetic Oligonucleotide
ugagggcaagcuuucucaa

SEQ ID NO: 876 - RNA, 19 nt, Artificial Sequence
  Synthetic Oligonucleotide
uuugugcgacaaugcuuca

SEQ ID NO: 877 - RNA, 19 nt, Artificial Sequence
  Synthetic Oligonucleotide
uugugcgacaaugcuucaa

SEQ ID NO: 878 - RNA, 19 nt, Artificial Sequence
  Synthetic Oligonucleotide
cuugguucaacuccuuccu

SEQ ID NO: 879 - RNA, 19 nt, Artificial Sequence
  Synthetic Oligonucleotide
ucuugguucaacuccuucc

SEQ ID NO: 880 - RNA, 19 nt, Artificial Sequence
  Synthetic Oligonucleotide
uaaugaucccuggguuuug

SEQ ID NO: 881 - RNA, 19 nt, Artificial Sequence
  Synthetic Oligonucleotide
augaucccuggguuuugcu

SEQ ID NO: 882 - RNA, 19 nt, Artificial Sequence
  Synthetic Oligonucleotide
aaugaucccuggguuuugc

SEQ ID NO: 883 - RNA, 19 nt, Artificial Sequence
  Synthetic Oligonucleotide
uuaaugaucccuggguuuu

SEQ ID NO: 884 - RNA, 19 nt, Artificial Sequence
  Synthetic Oligonucleotide
auuaaugaucccuggguuu

SEQ ID NO: 885 - RNA, 19 nt, Artificial Sequence
  Synthetic Oligonucleotide
ccugauuaaugaucccugg

SEQ ID NO: 886 - RNA, 19 nt, Artificial Sequence
  Synthetic Oligonucleotide
ugccugauuaaugaucccu

SEQ ID NO: 887 - RNA, 19 nt, Artificial Sequence
  Synthetic Oligonucleotide
gccugauuaaugaucccug

SEQ ID NO: 888 - RNA, 19 nt, Artificial Sequence
  Synthetic Oligonucleotide
cugauuaaugaucccuggg

SEQ ID NO: 889 - RNA, 19 nt, Artificial Sequence
  Synthetic Oligonucleotide
gauuaaugaucccuggguu

SEQ ID NO: 890 - RNA, 19 nt, Artificial Sequence
  Synthetic Oligonucleotide
ugauuaaugaucccugggu

SEQ ID NO: 891 - RNA, 19 nt, Artificial Sequence
  Synthetic Oligonucleotide
aggagugccugauuaauga

SEQ ID NO: 892 - RNA, 19 nt, Artificial Sequence
  Synthetic Oligonucleotide
gaggagugccugauuaaug

SEQ ID NO: 893 - RNA, 19 nt, Artificial Sequence
  Synthetic Oligonucleotide
ugaggagugccugauuaau

SEQ ID NO: 894 - RNA, 19 nt, Artificial Sequence
  Synthetic Oligonucleotide
aagauuuugugcgacaaug

SEQ ID NO: 895 - RNA, 19 nt, Artificial Sequence
  Synthetic Oligonucleotide
gagugccugauuaaugauc

SEQ ID NO: 896 - RNA, 19 nt, Artificial Sequence
  Synthetic Oligonucleotide
agugccugauuaaugaucc

SEQ ID NO: 897 - RNA, 19 nt, Artificial Sequence
  Synthetic Oligonucleotide
ggagugccugauuaaugau

SEQ ID NO: 898 - RNA, 19 nt, Artificial Sequence
  Synthetic Oligonucleotide
gugccugauuaaugauccc

SEQ ID NO: 899 - RNA, 19 nt, Artificial Sequence
  Synthetic Oligonucleotide
acaaauuugcagcaauaug

SEQ ID NO: 900 - RNA, 19 nt, Artificial Sequence
  Synthetic Oligonucleotide
aacaaauuugcagcaauau

SEQ ID NO: 901 - RNA, 19 nt, Artificial Sequence
  Synthetic Oligonucleotide
aaauuugcagcaauaugca

SEQ ID NO: 902 - RNA, 19 nt, Artificial Sequence
  Synthetic Oligonucleotide
caaauuugcagcaauaugc

SEQ ID NO: 903 - RNA, 19 nt, Artificial Sequence
  Synthetic Oligonucleotide
aauuugcagcaauaugcac

SEQ ID NO: 904 - RNA, 19 nt, Artificial Sequence
  Synthetic Oligonucleotide
auggaagauuuugugcgac

SEQ ID NO: 905 - RNA, 19 nt, Artificial Sequence
  Synthetic Oligonucleotide
uggaagauuuugugcgaca

SEQ ID NO: 906 - RNA, 19 nt, Artificial Sequence
  Synthetic Oligonucleotide
uuuuagagccuauguggau

SEQ ID NO: 907 - RNA, 19 nt, Artificial Sequence
  Synthetic Oligonucleotide
aauuuuagagccuaugugg

SEQ ID NO: 908 - RNA, 19 nt, Artificial Sequence
  Synthetic Oligonucleotide
auuuuagagccuaugugga

SEQ ID NO: 909 - RNA, 19 nt, Artificial Sequence
  Synthetic Oligonucleotide
gaagauuuugugcgacaau

SEQ ID NO: 910 - RNA, 19 nt, Artificial Sequence
  Synthetic Oligonucleotide
ucauguauucagauuuuca

SEQ ID NO: 911 - RNA, 19 nt, Artificial Sequence
  Synthetic Oligonucleotide
uucauguauucagauuuuc

SEQ ID NO: 912 - RNA, 19 nt, Artificial Sequence
  Synthetic Oligonucleotide
gcauccugugcagcaaugg

SEQ ID NO: 913 - RNA, 19 nt, Artificial Sequence
  Synthetic Oligonucleotide
augcauccugugcagcaau

SEQ ID NO: 914 - RNA, 19 nt, Artificial Sequence
  Synthetic Oligonucleotide
aaugcauccugugcagcaa

SEQ ID NO: 915 - RNA, 19 nt, Artificial Sequence
  Synthetic Oligonucleotide
ugcauccugugcagcaaug

SEQ ID NO: 916 - RNA, 19 nt, Artificial Sequence
  Synthetic Oligonucleotide
cauccugugcagcaaugga

SEQ ID NO: 917 - RNA, 19 nt, Artificial Sequence
  Synthetic Oligonucleotide
gauuuugugcgacaaugcu

SEQ ID NO: 918 - RNA, 19 nt, Artificial Sequence
  Synthetic Oligonucleotide
auuuugugcgacaaugcuu

SEQ ID NO: 919 - RNA, 19 nt, Artificial Sequence
  Synthetic Oligonucleotide
ggaagauuuugugcgacaa

SEQ ID NO: 920 - RNA, 19 nt, Artificial Sequence
  Synthetic Oligonucleotide
agaauuuuagagccuaugu

SEQ ID NO: 921 - RNA, 19 nt, Artificial Sequence
  Synthetic Oligonucleotide
uuuugugcgacaaugcuuc

SEQ ID NO: 922 - RNA, 19 nt, Artificial Sequence
  Synthetic Oligonucleotide
agauuuugugcgacaaugc

SEQ ID NO: 923 - RNA, 19 nt, Artificial Sequence
  Synthetic Oligonucleotide
gagaauuuuagagccuaug

SEQ ID NO: 924 - RNA, 19 nt, Artificial Sequence
  Synthetic Oligonucleotide
gaauuuuagagccuaugug

SEQ ID NO: 925 - RNA, 19 nt, Artificial Sequence
  Synthetic Oligonucleotide
ugagaauuuuagagccuau

SEQ ID NO: 926 - RNA, 19 nt, Artificial Sequence
  Synthetic Oligonucleotide
uugagaauuuuagagccua

SEQ ID NO: 927 - RNA, 19 nt, Artificial Sequence
  Synthetic Oligonucleotide
acaaacaaauuugcagcaa

SEQ ID NO: 928 - RNA, 19 nt, Artificial Sequence
  Synthetic Oligonucleotide
caaacaaauuugcagcaau

SEQ ID NO: 929 - RNA, 19 nt, Artificial Sequence
  Synthetic Oligonucleotide
guauucagauuuucauuuc

SEQ ID NO: 930 - RNA, 19 nt, Artificial Sequence
  Synthetic Oligonucleotide
uauucagauuuucauuuca

SEQ ID NO: 931 - RNA, 19 nt, Artificial Sequence
  Synthetic Oligonucleotide
uguauucagauuuucauuu

SEQ ID NO: 932 - RNA, 19 nt, Artificial Sequence
  Synthetic Oligonucleotide
auucagauuuucauuucau

SEQ ID NO: 933 - RNA, 19 nt, Artificial Sequence
  Synthetic Oligonucleotide
auguauucagauuuucauu

SEQ ID NO: 934 - RNA, 19 nt, Artificial Sequence
  Synthetic Oligonucleotide
aaacaaauuugcagcaaua

SEQ ID NO: 935 - RNA, 19 nt, Artificial Sequence
  Synthetic Oligonucleotide
guucaggcucuuagggaca

SEQ ID NO: 936 - RNA, 19 nt, Artificial Sequence
  Synthetic Oligonucleotide
uucaggcucuuagggacaa

SEQ ID NO: 937 - RNA, 19 nt, Artificial Sequence
  Synthetic Oligonucleotide
gauuuucauuucaucaaug

SEQ ID NO: 938 - RNA, 19 nt, Artificial Sequence
  Synthetic Oligonucleotide
cauguauucagauuuucau

SEQ ID NO: 939 - RNA, 19 nt, Artificial Sequence
  Synthetic Oligonucleotide
auuuucauuucaucaauga

SEQ ID NO: 940 - RNA, 19 nt, Artificial Sequence
  Synthetic Oligonucleotide
ucagauuuucauuucauca

SEQ ID NO: 941 - RNA, 19 nt, Artificial Sequence
  Synthetic Oligonucleotide
gaaacaaacaaauuugcag

SEQ ID NO: 942 - RNA, 19 nt, Artificial Sequence
  Synthetic Oligonucleotide
aaacaaacaaauuugcagc

SEQ ID NO: 943 - RNA, 19 nt, Artificial Sequence
  Synthetic Oligonucleotide
cagauuuucauuucaucaa

SEQ ID NO: 944 - RNA, 19 nt, Artificial Sequence
  Synthetic Oligonucleotide
aacaaacaaauuugcagca

SEQ ID NO: 945 - RNA, 19 nt, Artificial Sequence
  Synthetic Oligonucleotide
agauuuucauuucaucaau

SEQ ID NO: 946 - RNA, 19 nt, Artificial Sequence
  Synthetic Oligonucleotide
uucagauuuucauuucauc

SEQ ID NO: 947 - RNA, 19 nt, Artificial Sequence
  Synthetic Oligonucleotide
agccuauguggauggauuc

SEQ ID NO: 948 - RNA, 19 nt, Artificial Sequence
  Synthetic Oligonucleotide
cacauuuucucauucacug

SEQ ID NO: 949 - RNA, 19 nt, Artificial Sequence
  Synthetic Oligonucleotide
acauuuucucauucacugg

SEQ ID NO: 950 - RNA, 19 nt, Artificial Sequence
  Synthetic Oligonucleotide
acauucuuuggauggaaag

SEQ ID NO: 951 - RNA, 19 nt, Artificial Sequence
  Synthetic Oligonucleotide
cauucuuuggauggaaaga

SEQ ID NO: 952 - RNA, 19 nt, Artificial Sequence
  Synthetic Oligonucleotide
cuauguggauggauucgaa

SEQ ID NO: 953 - RNA, 19 nt, Artificial Sequence
  Synthetic Oligonucleotide
ccuauguggauggauucga

SEQ ID NO: 954 - RNA, 19 nt, Artificial Sequence
  Synthetic Oligonucleotide
auguggauggauucgaacc

SEQ ID NO: 955 - RNA, 19 nt, Artificial Sequence
  Synthetic Oligonucleotide
uauguggauggauucgaac

SEQ ID NO: 956 - RNA, 19 nt, Artificial Sequence
  Synthetic Oligonucleotide
uaaacuuugugagcaugga

SEQ ID NO: 957 - RNA, 19 nt, Artificial Sequence
  Synthetic Oligonucleotide
guaaacuuugugagcaugg

SEQ ID NO: 958 - RNA, 19 nt, Artificial Sequence
  Synthetic Oligonucleotide
ugguaaacuuugugagcau

SEQ ID NO: 959 - RNA, 19 nt, Artificial Sequence
  Synthetic Oligonucleotide
gcgauuugaagcaauauga

SEQ ID NO: 960 - RNA, 19 nt, Artificial Sequence
  Synthetic Oligonucleotide
gugguaaacuuugugagca

SEQ ID NO: 961 - RNA, 19 nt, Artificial Sequence
  Synthetic Oligonucleotide
gguaaacuuugugagcaug

SEQ ID NO: 962 - RNA, 19 nt, Artificial Sequence
  Synthetic Oligonucleotide
gauuugaagcaauaugaua

SEQ ID NO: 963 - RNA, 19 nt, Artificial Sequence
  Synthetic Oligonucleotide
auuugaagcaauaugauag

SEQ ID NO: 964 - RNA, 19 nt, Artificial Sequence
  Synthetic Oligonucleotide
gccuauguggauggauucg

SEQ ID NO: 965 - RNA, 19 nt, Artificial Sequence
  Synthetic Oligonucleotide
uaagcgauuugaagcaaua

SEQ ID NO: 966 - RNA, 19 nt, Artificial Sequence
  Synthetic Oligonucleotide
aagcgauuugaagcaauau

SEQ ID NO: 967 - RNA, 19 nt, Artificial Sequence
  Synthetic Oligonucleotide
aaaugaaauggggaaugga

SEQ ID NO: 968 - RNA, 19 nt, Artificial Sequence
  Synthetic Oligonucleotide
aaaaugaaauggggaaugg

SEQ ID NO: 969 - RNA, 19 nt, Artificial Sequence
  Synthetic Oligonucleotide
ugaagcaauaugauaguga

SEQ ID NO: 970 - RNA, 19 nt, Artificial Sequence
  Synthetic Oligonucleotide
agcgauuugaagcaauaug

SEQ ID NO: 971 - RNA, 19 nt, Artificial Sequence
  Synthetic Oligonucleotide
aaauggggaauggagauga

SEQ ID NO: 972 - RNA, 19 nt, Artificial Sequence
  Synthetic Oligonucleotide
ugaaauggggaauggagau

SEQ ID NO: 973 - RNA, 19 nt, Artificial Sequence
  Synthetic Oligonucleotide
aauggggaauggagaugag

SEQ ID NO: 974 - RNA, 19 nt, Artificial Sequence
  Synthetic Oligonucleotide
gaaauggggaauggagaug

SEQ ID NO: 975 - RNA, 19 nt, Artificial Sequence
  Synthetic Oligonucleotide
augaaauggggaauggaga

SEQ ID NO: 976 - RNA, 19 nt, Artificial Sequence
  Synthetic Oligonucleotide
uugaagcaauaugauagug

SEQ ID NO: 977 - RNA, 19 nt, Artificial Sequence
  Synthetic Oligonucleotide
cgauuugaagcaauaugau

SEQ ID NO: 978 - RNA, 19 nt, Artificial Sequence
  Synthetic Oligonucleotide
aaugaaauggggaauggag

SEQ ID NO: 979 - RNA, 19 nt, Artificial Sequence
  Synthetic Oligonucleotide
auggauucgaaccgaacgg

SEQ ID NO: 980 - RNA, 19 nt, Artificial Sequence
  Synthetic Oligonucleotide
gauggauucgaaccgaacg

SEQ ID NO: 981 - RNA, 19 nt, Artificial Sequence
  Synthetic Oligonucleotide
uguggauggauucgaaccg

SEQ ID NO: 982 - RNA, 19 nt, Artificial Sequence
  Synthetic Oligonucleotide
guggauggauucgaaccga

SEQ ID NO: 983 - RNA, 19 nt, Artificial Sequence
  Synthetic Oligonucleotide
uggauggauucgaaccgaa

SEQ ID NO: 984 - RNA, 19 nt, Artificial Sequence
  Synthetic Oligonucleotide
uuugaagcaauaugauagu

SEQ ID NO: 985 - RNA, 19 nt, Artificial Sequence
  Synthetic Oligonucleotide
ggauggauucgaaccgaac

SEQ ID NO: 986 - RNA, 19 nt, Artificial Sequence
  Synthetic Oligonucleotide
ggauucgaaccgaacggcu

SEQ ID NO: 987 - RNA, 19 nt, Artificial Sequence
  Synthetic Oligonucleotide
aacauucuuuggauggaaa

SEQ ID NO: 988 - RNA, 19 nt, Artificial Sequence
  Synthetic Oligonucleotide
uggauucgaaccgaacggc

SEQ ID NO: 989 - RNA, 19 nt, Artificial Sequence
  Synthetic Oligonucleotide
uaaugaaggggguauacau

SEQ ID NO: 990 - RNA, 19 nt, Artificial Sequence
  Synthetic Oligonucleotide
auaaugaaggggguauaca

SEQ ID NO: 991 - RNA, 19 nt, Artificial Sequence
  Synthetic Oligonucleotide
caaugaaagaguauggaga

SEQ ID NO: 992 - RNA, 19 nt, Artificial Sequence
  Synthetic Oligonucleotide
auaagcgauuugaagcaau

SEQ ID NO: 993 - RNA, 19 nt, Artificial Sequence
  Synthetic Oligonucleotide
ugaaggggguauacauuaa

SEQ ID NO: 994 - RNA, 19 nt, Artificial Sequence
  Synthetic Oligonucleotide
augaaggggguauacauua

SEQ ID NO: 995 - RNA, 19 nt, Artificial Sequence
  Synthetic Oligonucleotide
aaugaaggggguauacauu

SEQ ID NO: 996 - RNA, 19 nt, Artificial Sequence
  Synthetic Oligonucleotide
aagcuuucucaaaugucca

SEQ ID NO: 997 - RNA, 19 nt, Artificial Sequence
  Synthetic Oligonucleotide
agcuuucucaaauguccaa

SEQ ID NO: 998 - RNA, 19 nt, Artificial Sequence
  Synthetic Oligonucleotide
aaagaguuuuuugagaaua

SEQ ID NO: 999 - RNA, 19 nt, Artificial Sequence
  Synthetic Oligonucleotide
caagcuuucucaaaugucc

SEQ ID NO: 1000 - RNA, 19 nt, Artificial Sequence
  Synthetic Oligonucleotide
gcuuucucaaauguccaaa

SEQ ID NO: 1001 - RNA, 19 nt, Artificial Sequence
  Synthetic Oligonucleotide
agaggcgaagaaacaauug

SEQ ID NO: 1002 - RNA, 19 nt, Artificial Sequence
  Synthetic Oligonucleotide
gaggcgaagaaacaauuga

SEQ ID NO: 1003 - RNA, 19 nt, Artificial Sequence
  Synthetic Oligonucleotide
gcgaagaaacaauugaaga

SEQ ID NO: 1004 - RNA, 19 nt, Artificial Sequence
  Synthetic Oligonucleotide
ggcgaagaaacaauugaag

SEQ ID NO: 1005 - RNA, 19 nt, Artificial Sequence
  Synthetic Oligonucleotide
aggcgaagaaacaauugaa

SEQ ID NO: 1006 - RNA, 19 nt, Artificial Sequence
  Synthetic Oligonucleotide
cgaagaaacaauugaagaa

SEQ ID NO: 1007 - RNA, 19 nt, Artificial Sequence
  Synthetic Oligonucleotide
gaagaaacaauugaagaaa

SEQ ID NO: 1008 - RNA, 19 nt, Artificial Sequence
  Synthetic Oligonucleotide
gcaaugaaagaguauggag

SEQ ID NO: 1009 - RNA, 19 nt, Artificial Sequence
  Synthetic Oligonucleotide
uucuuuggauggaaagaac

SEQ ID NO: 1010 - RNA, 19 nt, Artificial Sequence
  Synthetic Oligonucleotide
ucuuuggauggaaagaacc

SEQ ID NO: 1011 - RNA, 19 nt, Artificial Sequence
  Synthetic Oligonucleotide
auucuuuggauggaaagaa

SEQ ID NO: 1012 - RNA, 19 nt, Artificial Sequence
  Synthetic Oligonucleotide
aaugaaagaguauggagag

SEQ ID NO: 1013 - RNA, 19 nt, Artificial Sequence
  Synthetic Oligonucleotide
aggggguauacauuaauac

SEQ ID NO: 1014 - RNA, 19 nt, Artificial Sequence
  Synthetic Oligonucleotide
aaggggguauacauuaaua

SEQ ID NO: 1015 - RNA, 19 nt, Artificial Sequence
  Synthetic Oligonucleotide
gaaggggguauacauuaau

SEQ ID NO: 1016 - RNA, 19 nt, Artificial Sequence
  Synthetic Oligonucleotide
ggggcuauaugaagcaauu

SEQ ID NO: 1017 - RNA, 19 nt, Artificial Sequence
  Synthetic Oligonucleotide
aagcaauaugauagugacg

SEQ ID NO: 1018 - RNA, 19 nt, Artificial Sequence
  Synthetic Oligonucleotide
agcaauaugauagugacga

SEQ ID NO: 1019 - RNA, 19 nt, Artificial Sequence
  Synthetic Oligonucleotide
uuguucaggcucuuaggga

SEQ ID NO: 1020 - RNA, 19 nt, Artificial Sequence
  Synthetic Oligonucleotide
uguucaggcucuuagggac

SEQ ID NO: 1021 - RNA, 19 nt, Artificial Sequence
  Synthetic Oligonucleotide
gaagcaauaugauagugac

SEQ ID NO: 1022 - RNA, 19 nt, Artificial Sequence
  Synthetic Oligonucleotide
uguaugauuacaaggagaa

SEQ ID NO: 1023 - RNA, 19 nt, Artificial Sequence
  Synthetic Oligonucleotide
agaaugaguucaacaaggc

SEQ ID NO: 1024 - RNA, 19 nt, Artificial Sequence
  Synthetic Oligonucleotide
cagaaugaguucaacaagg

SEQ ID NO: 1025 - RNA, 19 nt, Artificial Sequence
  Synthetic Oligonucleotide
gaaagaggcgaagaaacaa

SEQ ID NO: 1026 - RNA, 19 nt, Artificial Sequence
  Synthetic Oligonucleotide
aaagaggcgaagaaacaau

SEQ ID NO: 1027 - RNA, 19 nt, Artificial Sequence
  Synthetic Oligonucleotide
gggggcuauaugaagcaau

SEQ ID NO: 1028 - RNA, 19 nt, Artificial Sequence
  Synthetic Oligonucleotide
gggguauacauuaauacug

SEQ ID NO: 1029 - RNA, 19 nt, Artificial Sequence
  Synthetic Oligonucleotide
ggguauacauuaauacugc

SEQ ID NO: 1030 - RNA, 19 nt, Artificial Sequence
  Synthetic Oligonucleotide
ggggguauacauuaauacu

SEQ ID NO: 1031 - RNA, 19 nt, Artificial Sequence
  Synthetic Oligonucleotide
ggggggcuauaugaagcaa

SEQ ID NO: 1032 - RNA, 19 nt, Artificial Sequence
  Synthetic Oligonucleotide
auagugacgaaccugaauu

SEQ ID NO: 1033 - RNA, 19 nt, Artificial Sequence
  Synthetic Oligonucleotide
caauaugauagugacgaac

SEQ ID NO: 1034 - RNA, 19 nt, Artificial Sequence
  Synthetic Oligonucleotide
uaugauagugacgaaccug

SEQ ID NO: 1035 - RNA, 19 nt, Artificial Sequence
  Synthetic Oligonucleotide
aauaugauagugacgaacc

SEQ ID NO: 1036 - RNA, 19 nt, Artificial Sequence
  Synthetic Oligonucleotide
ugauagugacgaaccugaa

SEQ ID NO: 1037 - RNA, 19 nt, Artificial Sequence
  Synthetic Oligonucleotide
augauagugacgaaccuga

SEQ ID NO: 1038 - RNA, 19 nt, Artificial Sequence
  Synthetic Oligonucleotide
gauagugacgaaccugaau

SEQ ID NO: 1039 - RNA, 19 nt, Artificial Sequence
  Synthetic Oligonucleotide
auaugauagugacgaaccu

SEQ ID NO: 1040 - RNA, 19 nt, Artificial Sequence
  Synthetic Oligonucleotide
gcaauaugauagugacgaa

SEQ ID NO: 1041 - RNA, 19 nt, Artificial Sequence
  Synthetic Oligonucleotide
uucgucaguccgaaagagg

SEQ ID NO: 1042 - RNA, 19 nt, Artificial Sequence
  Synthetic Oligonucleotide
uuucgucaguccgaaagag

SEQ ID NO: 1043 - RNA, 19 nt, Artificial Sequence
  Synthetic Oligonucleotide
ucgucaguccgaaagaggc

SEQ ID NO: 1044 - RNA, 19 nt, Artificial Sequence
  Synthetic Oligonucleotide
cgucaguccgaaagaggcg

SEQ ID NO: 1045 - RNA, 19 nt, Artificial Sequence
  Synthetic Oligonucleotide
gucaguccgaaagaggcga

SEQ ID NO: 1046 - RNA, 19 nt, Artificial Sequence
  Synthetic Oligonucleotide
augugguaaacuuugugag

SEQ ID NO: 1047 - RNA, 19 nt, Artificial Sequence
  Synthetic Oligonucleotide
gaugugguaaacuuuguga

SEQ ID NO: 1048 - RNA, 19 nt, Artificial Sequence
  Synthetic Oligonucleotide
aguccgaaagaggcgaaga

SEQ ID NO: 1049 - RNA, 19 nt, Artificial Sequence
  Synthetic Oligonucleotide
caguccgaaagaggcgaag

SEQ ID NO: 1050 - RNA, 19 nt, Artificial Sequence
  Synthetic Oligonucleotide
ccuuucgucaguccgaaag

SEQ ID NO: 1051 - RNA, 19 nt, Artificial Sequence
  Synthetic Oligonucleotide
ucaguccgaaagaggcgaa

SEQ ID NO: 1052 - RNA, 19 nt, Artificial Sequence
  Synthetic Oligonucleotide
uccuuucgucaguccgaaa

SEQ ID NO: 1053 - RNA, 19 nt, Artificial Sequence
  Synthetic Oligonucleotide
cuuucgucaguccgaaaga

SEQ ID NO: 1054 - RNA, 19 nt, Artificial Sequence
  Synthetic Oligonucleotide
cucaaauguccaaagaagu

SEQ ID NO: 1055 - RNA, 19 nt, Artificial Sequence
  Synthetic Oligonucleotide
cuuucucaaauguccaaag

SEQ ID NO: 1056 - RNA, 19 nt, Artificial Sequence
  Synthetic Oligonucleotide
ugugguaaacuuugugagc

SEQ ID NO: 1057 - RNA, 19 nt, Artificial Sequence
  Synthetic Oligonucleotide
ucucaaauguccaaagaag

SEQ ID NO: 1058 - RNA, 19 nt, Artificial Sequence
  Synthetic Oligonucleotide
gcauugagggcaagcuuuc

SEQ ID NO: 1059 - RNA, 19 nt, Artificial Sequence
  Synthetic Oligonucleotide
ugcauugagggcaagcuuu

SEQ ID NO: 1060 - RNA, 19 nt, Artificial Sequence
  Synthetic Oligonucleotide
uuucucaaauguccaaaga

SEQ ID NO: 1061 - RNA, 19 nt, Artificial Sequence
  Synthetic Oligonucleotide
uucucaaauguccaaagaa

SEQ ID NO: 1062 - RNA, 19 nt, Artificial Sequence
  Synthetic Oligonucleotide
ggcugcauugagggcaagc

SEQ ID NO: 1063 - RNA, 19 nt, Artificial Sequence
  Synthetic Oligonucleotide
gcugcauugagggcaagcu

SEQ ID NO: 1064 - RNA, 19 nt, Artificial Sequence
  Synthetic Oligonucleotide
cugcauugagggcaagcuu

SEQ ID NO: 1065 - RNA, 19 nt, Artificial Sequence
  Synthetic Oligonucleotide
aacggcugcauugagggca

SEQ ID NO: 1066 - RNA, 19 nt, Artificial Sequence
  Synthetic Oligonucleotide
acggcugcauugagggcaa

SEQ ID NO: 1067 - RNA, 19 nt, Artificial Sequence
  Synthetic Oligonucleotide
cggcugcauugagggcaag

SEQ ID NO: 1068 - RNA, 19 nt, Artificial Sequence
  Synthetic Oligonucleotide
ucuggauagagcucgauga

SEQ ID NO: 1069 - RNA, 19 nt, Artificial Sequence
  Synthetic Oligonucleotide
cgaaagaggcgaagaaaca

SEQ ID NO: 1070 - RNA, 19 nt, Artificial Sequence
  Synthetic Oligonucleotide
aaccgaacggcugcauuga

SEQ ID NO: 1071 - RNA, 19 nt, Artificial Sequence
  Synthetic Oligonucleotide
uccgaaagaggcgaagaaa

SEQ ID NO: 1072 - RNA, 19 nt, Artificial Sequence
  Synthetic Oligonucleotide
ccgaaagaggcgaagaaac

SEQ ID NO: 1073 - RNA, 19 nt, Artificial Sequence
  Synthetic Oligonucleotide
aagaggcgaagaaacaauu

SEQ ID NO: 1074 - RNA, 19 nt, Artificial Sequence
  Synthetic Oligonucleotide
cgaacggcugcauugaggg

SEQ ID NO: 1075 - RNA, 19 nt, Artificial Sequence
  Synthetic Oligonucleotide
ccgaacggcugcauugagg

SEQ ID NO: 1076 - RNA, 19 nt, Artificial Sequence
  Synthetic Oligonucleotide
gaacggcugcauugagggc

SEQ ID NO: 1077 - RNA, 19 nt, Artificial Sequence
  Synthetic Oligonucleotide
accgaacggcugcauugag

SEQ ID NO: 1078 - RNA, 19 nt, Artificial Sequence
  Synthetic Oligonucleotide
guccgaaagaggcgaagaa

SEQ ID NO: 1079 - RNA, 19 nt, Artificial Sequence
  Synthetic Oligonucleotide
ugggauuccuuucgucagu

SEQ ID NO: 1080 - RNA, 19 nt, Artificial Sequence
  Synthetic Oligonucleotide
gggauuccuuucgucaguc

SEQ ID NO: 1081 - RNA, 19 nt, Artificial Sequence
  Synthetic Oligonucleotide
ccgaacuucuccugccuug

SEQ ID NO: 1082 - RNA, 19 nt, Artificial Sequence
  Synthetic Oligonucleotide
cgaacuucuccugccuuga

SEQ ID NO: 1083 - RNA, 19 nt, Artificial Sequence
  Synthetic Oligonucleotide
aacuucuccugccuugaga

SEQ ID NO: 1084 - RNA, 19 nt, Artificial Sequence
  Synthetic Oligonucleotide
gaacuucuccugccuugag

SEQ ID NO: 1085 - RNA, 19 nt, Artificial Sequence
  Synthetic Oligonucleotide
acuucuccugccuugagaa

SEQ ID NO: 1086 - RNA, 19 nt, Artificial Sequence
  Synthetic Oligonucleotide
gaaccgaacggcugcauug

SEQ ID NO: 1087 - RNA, 19 nt, Artificial Sequence
  Synthetic Oligonucleotide
cugccuugagaauuuuaga

SEQ ID NO: 1088 - RNA, 19 nt, Artificial Sequence
  Synthetic Oligonucleotide
uccugccuugagaauuuua

SEQ ID NO: 1089 - RNA, 19 nt, Artificial Sequence
  Synthetic Oligonucleotide
ucuccugccuugagaauuu

SEQ ID NO: 1090 - RNA, 19 nt, Artificial Sequence
  Synthetic Oligonucleotide
ccugccuugagaauuuuag

SEQ ID NO: 1091 - RNA, 19 nt, Artificial Sequence
  Synthetic Oligonucleotide
uucuccugccuugagaauu

SEQ ID NO: 1092 - RNA, 19 nt, Artificial Sequence
  Synthetic Oligonucleotide
cuccugccuugagaauuuu

SEQ ID NO: 1093 - RNA, 19 nt, Artificial Sequence
  Synthetic Oligonucleotide
ccuugagaauuuuagagcc

SEQ ID NO: 1094 - RNA, 19 nt, Artificial Sequence
  Synthetic Oligonucleotide
cuugagaauuuuagagccu

SEQ ID NO: 1095 - RNA, 19 nt, Artificial Sequence
  Synthetic Oligonucleotide
gccuugagaauuuuagagc

SEQ ID NO: 1096 - RNA, 19 nt, Artificial Sequence
  Synthetic Oligonucleotide
ugccuugagaauuuuagag

SEQ ID NO: 1097 - RNA, 19 nt, Artificial Sequence
  Synthetic Oligonucleotide
aacauggcaccagagaaag

SEQ ID NO: 1098 - RNA, 19 nt, Artificial Sequence
  Synthetic Oligonucleotide
acauggcaccagagaaagu

SEQ ID NO: 1099 - RNA, 19 nt, Artificial Sequence
  Synthetic Oligonucleotide
cuucuccugccuugagaau

SEQ ID NO: 1100 - RNA, 19 nt, Artificial Sequence
  Synthetic Oligonucleotide
cgaaccgaacggcugcauu

SEQ ID NO: 1101 - RNA, 19 nt, Artificial Sequence
  Synthetic Oligonucleotide
ucgaaccgaacggcugcau

SEQ ID NO: 1102 - RNA, 19 nt, Artificial Sequence
  Synthetic Oligonucleotide
uucgaaccgaacggcugca

SEQ ID NO: 1103 - RNA, 19 nt, Artificial Sequence
  Synthetic Oligonucleotide
auucgaaccgaacggcugc

SEQ ID NO: 1104 - RNA, 19 nt, Artificial Sequence
  Synthetic Oligonucleotide
gcaugauugaagccgaguc

SEQ ID NO: 1105 - RNA, 19 nt, Artificial Sequence
  Synthetic Oligonucleotide
gauucgaaccgaacggcug

SEQ ID NO: 1106 - RNA, 19 nt, Artificial Sequence
  Synthetic Oligonucleotide
agcaugauugaagccgagu

SEQ ID NO: 1107 - RNA, 19 nt, Artificial Sequence
  Synthetic Oligonucleotide
uggcaccagagaaaguaga

SEQ ID NO: 1108 - RNA, 19 nt, Artificial Sequence
  Synthetic Oligonucleotide
auggcaccagagaaaguag

SEQ ID NO: 1109 - RNA, 19 nt, Artificial Sequence
  Synthetic Oligonucleotide
uuguaugauuacaaggaga

SEQ ID NO: 1110 - RNA, 19 nt, Artificial Sequence
  Synthetic Oligonucleotide
cauggcaccagagaaagua

SEQ ID NO: 1111 - RNA, 19 nt, Artificial Sequence
  Synthetic Oligonucleotide
gcaccagagaaaguagacu

SEQ ID NO: 1112 - RNA, 19 nt, Artificial Sequence
  Synthetic Oligonucleotide
caccagagaaaguagacuu

SEQ ID NO: 1113 - RNA, 19 nt, Artificial Sequence
  Synthetic Oligonucleotide
ggcaccagagaaaguagac

SEQ ID NO: 1114 - RNA, 19 nt, Artificial Sequence
  Synthetic Oligonucleotide
ccagagaaaguagacuuug

SEQ ID NO: 1115 - RNA, 19 nt, Artificial Sequence
  Synthetic Oligonucleotide
accagagaaaguagacuuu

SEQ ID NO: 1116 - RNA, 19 nt, Artificial Sequence
  Synthetic Oligonucleotide
cagagaaaguagacuuuga

SEQ ID NO: 1117 - RNA, 19 nt, Artificial Sequence
  Synthetic Oligonucleotide
aaagcagggcuaggauuaa

SEQ ID NO: 1118 - RNA, 19 nt, Artificial Sequence
  Synthetic Oligonucleotide
gaaagcagggcuaggauua

SEQ ID NO: 1119 - RNA, 19 nt, Artificial Sequence
  Synthetic Oligonucleotide
cucugggauuccuuucguc

SEQ ID NO: 1120 - RNA, 19 nt, Artificial Sequence
  Synthetic Oligonucleotide
ucugggauuccuuucguca

SEQ ID NO: 1121 - RNA, 19 nt, Artificial Sequence
  Synthetic Oligonucleotide
aaauggaagauuuugugcg

SEQ ID NO: 1122 - RNA, 19 nt, Artificial Sequence
  Synthetic Oligonucleotide
gauuccuuucgucaguccg

SEQ ID NO: 1123 - RNA, 19 nt, Artificial Sequence
  Synthetic Oligonucleotide
ggauuccuuucgucagucc

SEQ ID NO: 1124 - RNA, 19 nt, Artificial Sequence
  Synthetic Oligonucleotide
auuccuuucgucaguccga

SEQ ID NO: 1125 - RNA, 19 nt, Artificial Sequence
  Synthetic Oligonucleotide
ggccucugggauuccuuuc

SEQ ID NO: 1126 - RNA, 19 nt, Artificial Sequence
  Synthetic Oligonucleotide
gccucugggauuccuuucg

SEQ ID NO: 1127 - RNA, 19 nt, Artificial Sequence
  Synthetic Oligonucleotide
ccucugggauuccuuucgu

SEQ ID NO: 1128 - RNA, 19 nt, Artificial Sequence
  Synthetic Oligonucleotide
cugggauuccuuucgucag

SEQ ID NO: 1129 - RNA, 19 nt, Artificial Sequence
  Synthetic Oligonucleotide
aauggaagauuuugugcga

SEQ ID NO: 1130 - RNA, 19 nt, Artificial Sequence
  Synthetic Oligonucleotide
agaggccucugggauuccu

SEQ ID NO: 1131 - RNA, 19 nt, Artificial Sequence
  Synthetic Oligonucleotide
aggccucugggauuccuuu

SEQ ID NO: 1132 - RNA, 19 nt, Artificial Sequence
  Synthetic Oligonucleotide
gaggccucugggauuccuu

SEQ ID NO: 1133 - RNA, 19 nt, Artificial Sequence
  Synthetic Oligonucleotide
cagaggccucugggauucc

SEQ ID NO: 1134 - RNA, 19 nt, Artificial Sequence
  Synthetic Oligonucleotide
aagcacagauuugaaauaa

SEQ ID NO: 1135 - RNA, 19 nt, Artificial Sequence
  Synthetic Oligonucleotide
agcacagauuugaaauaau

SEQ ID NO: 1136 - RNA, 19 nt, Artificial Sequence
  Synthetic Oligonucleotide
gagaaagacaugaccaaag

SEQ ID NO: 1137 - RNA, 19 nt, Artificial Sequence
  Synthetic Oligonucleotide
agaaagacaugaccaaaga

SEQ ID NO: 1138 - RNA, 19 nt, Artificial Sequence
  Synthetic Oligonucleotide
uaagaagugccauaggcca

SEQ ID NO: 1139 - RNA, 19 nt, Artificial Sequence
  Synthetic Oligonucleotide
aaagacaugaccaaagagu

SEQ ID NO: 1140 - RNA, 19 nt, Artificial Sequence
  Synthetic Oligonucleotide
aagacaugaccaaagaguu

SEQ ID NO: 1141 - RNA, 19 nt, Artificial Sequence
  Synthetic Oligonucleotide
acaauugaagaaaaauuug

SEQ ID NO: 1142 - RNA, 19 nt, Artificial Sequence
  Synthetic Oligonucleotide
uugcagcaauaugcacuca

SEQ ID NO: 1143 - RNA, 19 nt, Artificial Sequence
  Synthetic Oligonucleotide
uauaugaugcgaucaagug

SEQ ID NO: 1144 - RNA, 19 nt, Artificial Sequence
  Synthetic Oligonucleotide
caauugaagaaaaauuuga

SEQ ID NO: 1145 - RNA, 19 nt, Artificial Sequence
  Synthetic Oligonucleotide
uugaagaaaaauuugaaau

SEQ ID NO: 1146 - RNA, 19 nt, Artificial Sequence
  Synthetic Oligonucleotide
cuaagaagugccauaggcc

SEQ ID NO: 1147 - RNA, 19 nt, Artificial Sequence
  Synthetic Oligonucleotide
uuugcagcaauaugcacuc

SEQ ID NO: 1148 - RNA, 19 nt, Artificial Sequence
  Synthetic Oligonucleotide
auuugcagcaauaugcacu

SEQ ID NO: 1149 - RNA, 19 nt, Artificial Sequence
  Synthetic Oligonucleotide
aauugaagaaaaauuugaa

SEQ ID NO: 1150 - RNA, 19 nt, Artificial Sequence
  Synthetic Oligonucleotide
auugaagaaaaauuugaaa

SEQ ID NO: 1151 - RNA, 19 nt, Artificial Sequence
  Synthetic Oligonucleotide
gaaagacaugaccaaagag

SEQ ID NO: 1152 - RNA, 19 nt, Artificial Sequence
  Synthetic Oligonucleotide
ugcagcaauaugcacucac

SEQ ID NO: 1153 - RNA, 19 nt, Artificial Sequence
  Synthetic Oligonucleotide
ugaagaaaaauuugaaauc

SEQ ID NO: 1154 - RNA, 19 nt, Artificial Sequence
  Synthetic Oligonucleotide
uuuucucauucacugggga

SEQ ID NO: 1155 - RNA, 19 nt, Artificial Sequence
  Synthetic Oligonucleotide
auuuucucauucacugggg

SEQ ID NO: 1156 - RNA, 19 nt, Artificial Sequence
  Synthetic Oligonucleotide
cauuuucucauucacuggg

SEQ ID NO: 1157 - RNA, 19 nt, Artificial Sequence
  Synthetic Oligonucleotide
cuaaaaacaugaagaaaac

SEQ ID NO: 1158 - RNA, 19 nt, Artificial Sequence
  Synthetic Oligonucleotide
ugugcagcaauggacgauu

SEQ ID NO: 1159 - RNA, 19 nt, Artificial Sequence
  Synthetic Oligonucleotide
auccugugcagcaauggac

SEQ ID NO: 1160 - RNA, 19 nt, Artificial Sequence
  Synthetic Oligonucleotide
gugcagcaauggacgauuu

SEQ ID NO: 1161 - RNA, 19 nt, Artificial Sequence
  Synthetic Oligonucleotide
uccugugcagcaauggacg

SEQ ID NO: 1162 - RNA, 19 nt, Artificial Sequence
  Synthetic Oligonucleotide
gacaugaccaaagaguuuu

SEQ ID NO: 1163 - RNA, 19 nt, Artificial Sequence
  Synthetic Oligonucleotide
acaugaccaaagaguuuuu

SEQ ID NO: 1164 - RNA, 19 nt, Artificial Sequence
  Synthetic Oligonucleotide
ccugugcagcaauggacga

SEQ ID NO: 1165 - RNA, 19 nt, Artificial Sequence
  Synthetic Oligonucleotide
agacaugaccaaagaguuu

SEQ ID NO: 1166 - RNA, 19 nt, Artificial Sequence
  Synthetic Oligonucleotide
cugugcagcaauggacgau

SEQ ID NO: 1167 - RNA, 19 nt, Artificial Sequence
  Synthetic Oligonucleotide
aggccuauguucuuguaug

SEQ ID NO: 1168 - RNA, 19 nt, Artificial Sequence
  Synthetic Oligonucleotide
ggccuauguucuuguaugu

SEQ ID NO: 1169 - RNA, 19 nt, Artificial Sequence
  Synthetic Oligonucleotide
gaaccugggaccuuugauc

SEQ ID NO: 1170 - RNA, 19 nt, Artificial Sequence
  Synthetic Oligonucleotide
aaccugggaccuuugaucu

SEQ ID NO: 1171 - RNA, 19 nt, Artificial Sequence
  Synthetic Oligonucleotide
aaggccuauguucuuguau

SEQ ID NO: 1172 - RNA, 19 nt, Artificial Sequence
  Synthetic Oligonucleotide
caaggccuauguucuugua

SEQ ID NO: 1173 - RNA, 19 nt, Artificial Sequence
  Synthetic Oligonucleotide
ucaaggccuauguucuugu

SEQ ID NO: 1174 - RNA, 19 nt, Artificial Sequence
  Synthetic Oligonucleotide
ugaccaaagaguuuuuuga

SEQ ID NO: 1175 - RNA, 19 nt, Artificial Sequence
  Synthetic Oligonucleotide
augaccaaagaguuuuuug

SEQ ID NO: 1176 - RNA, 19 nt, Artificial Sequence
  Synthetic Oligonucleotide
auguucuuguaugugagga

SEQ ID NO: 1177 - RNA, 19 nt, Artificial Sequence
  Synthetic Oligonucleotide
uguucuuguaugugaggac

SEQ ID NO: 1178 - RNA, 19 nt, Artificial Sequence
  Synthetic Oligonucleotide
cuauguucuuguaugugag

SEQ ID NO: 1179 - RNA, 19 nt, Artificial Sequence
  Synthetic Oligonucleotide
caugaccaaagaguuuuuu

SEQ ID NO: 1180 - RNA, 19 nt, Artificial Sequence
  Synthetic Oligonucleotide
ccuauguucuuguauguga

SEQ ID NO: 1181 - RNA, 19 nt, Artificial Sequence
  Synthetic Oligonucleotide
acuaaaaacaugaagaaaa

SEQ ID NO: 1182 - RNA, 19 nt, Artificial Sequence
  Synthetic Oligonucleotide
uggacaguaguaaacagua

SEQ ID NO: 1183 - RNA, 19 nt, Artificial Sequence
  Synthetic Oligonucleotide
uucuuguaugugaggacaa

SEQ ID NO: 1184 - RNA, 19 nt, Artificial Sequence
  Synthetic Oligonucleotide
ucuuguaugugaggacaaa

SEQ ID NO: 1185 - RNA, 19 nt, Artificial Sequence
  Synthetic Oligonucleotide
gaccaaagaguuuuuugag

SEQ ID NO: 1186 - RNA, 19 nt, Artificial Sequence
  Synthetic Oligonucleotide
ggacaguaguaaacaguau

SEQ ID NO: 1187 - RNA, 19 nt, Artificial Sequence
  Synthetic Oligonucleotide
uuuuugagaauaaaucaga

SEQ ID NO: 1188 - RNA, 19 nt, Artificial Sequence
  Synthetic Oligonucleotide
uuuuuugagaauaaaucag

SEQ ID NO: 1189 - RNA, 19 nt, Artificial Sequence
  Synthetic Oligonucleotide
uuuugagaauaaaucagaa

SEQ ID NO: 1190 - RNA, 19 nt, Artificial Sequence
  Synthetic Oligonucleotide
guucuuguaugugaggaca

SEQ ID NO: 1191 - RNA, 19 nt, Artificial Sequence
  Synthetic Oligonucleotide
uuuucucucacugacccga

SEQ ID NO: 1192 - RNA, 19 nt, Artificial Sequence
  Synthetic Oligonucleotide
aaaugggagaaauacugug

SEQ ID NO: 1193 - RNA, 19 nt, Artificial Sequence
  Synthetic Oligonucleotide
aaugggagaaauacugugu

SEQ ID NO: 1194 - RNA, 19 nt, Artificial Sequence
  Synthetic Oligonucleotide
ucaauagccuguaugcauc

SEQ ID NO: 1195 - RNA, 19 nt, Artificial Sequence
  Synthetic Oligonucleotide
gccuauguucuuguaugug

SEQ ID NO: 1196 - RNA, 19 nt, Artificial Sequence
  Synthetic Oligonucleotide
uucaauagccuguaugcau

SEQ ID NO: 1197 - RNA, 19 nt, Artificial Sequence
  Synthetic Oligonucleotide
accaaagaguuuuuugaga

SEQ ID NO: 1198 - RNA, 19 nt, Artificial Sequence
  Synthetic Oligonucleotide
uuucucucacugacccgag

SEQ ID NO: 1199 - RNA, 19 nt, Artificial Sequence
  Synthetic Oligonucleotide
gccaauaaaauuaaaucug

SEQ ID NO: 1200 - RNA, 19 nt, Artificial Sequence
  Synthetic Oligonucleotide
ccaauaaaauuaaaucuga

SEQ ID NO: 1201 - RNA, 19 nt, Artificial Sequence
  Synthetic Oligonucleotide
aagaguuuuuugagaauaa

SEQ ID NO: 1202 - RNA, 19 nt, Artificial Sequence
  Synthetic Oligonucleotide
aguuuuuugagaauaaauc

SEQ ID NO: 1203 - RNA, 19 nt, Artificial Sequence
  Synthetic Oligonucleotide
agaguuuuuugagaauaaa

SEQ ID NO: 1204 - RNA, 19 nt, Artificial Sequence
  Synthetic Oligonucleotide
gaguuuuuugagaauaaau

SEQ ID NO: 1205 - RNA, 19 nt, Artificial Sequence
  Synthetic Oligonucleotide
gccuggacaguaguaaaca

SEQ ID NO: 1206 - RNA, 19 nt, Artificial Sequence
  Synthetic Oligonucleotide
caauaaaauuaaaucugag

SEQ ID NO: 1207 - RNA, 19 nt, Artificial Sequence
  Synthetic Oligonucleotide
ccaaagaguuuuuugagaa

SEQ ID NO: 1208 - RNA, 19 nt, Artificial Sequence
  Synthetic Oligonucleotide
uggccuggacaguaguaaa

SEQ ID NO: 1209 - RNA, 19 nt, Artificial Sequence
  Synthetic Oligonucleotide
ggccuggacaguaguaaac

SEQ ID NO: 1210 - RNA, 19 nt, Artificial Sequence
  Synthetic Oligonucleotide
guuuuuugagaauaaauca

SEQ ID NO: 1211 - RNA, 19 nt, Artificial Sequence
  Synthetic Oligonucleotide
ccuggacaguaguaaacag

SEQ ID NO: 1212 - RNA, 19 nt, Artificial Sequence
  Synthetic Oligonucleotide
auggccuggacaguaguaa

SEQ ID NO: 1213 - RNA, 19 nt, Artificial Sequence
  Synthetic Oligonucleotide
uugaugauccaaaugcacu

SEQ ID NO: 1214 - RNA, 19 nt, Artificial Sequence
  Synthetic Oligonucleotide
cuugaugauccaaaugcac

SEQ ID NO: 1215 - RNA, 19 nt, Artificial Sequence
  Synthetic Oligonucleotide
ugauugaagccgaguccuc

SEQ ID NO: 1216 - RNA, 19 nt, Artificial Sequence
  Synthetic Oligonucleotide
aacagaggccucugggauu

SEQ ID NO: 1217 - RNA, 19 nt, Artificial Sequence
  Synthetic Oligonucleotide
acagaggccucugggauuc

SEQ ID NO: 1218 - RNA, 19 nt, Artificial Sequence
  Synthetic Oligonucleotide
augauugaagccgaguccu

SEQ ID NO: 1219 - RNA, 19 nt, Artificial Sequence
  Synthetic Oligonucleotide
aauaaaauuaaaucugaga

SEQ ID NO: 1220 - RNA, 19 nt, Artificial Sequence
  Synthetic Oligonucleotide
auaaaauuaaaucugagaa

SEQ ID NO: 1221 - RNA, 19 nt, Artificial Sequence
  Synthetic Oligonucleotide
gccaacagaggccucuggg

SEQ ID NO: 1222 - RNA, 19 nt, Artificial Sequence
  Synthetic Oligonucleotide
uggccaacagaggccucug

SEQ ID NO: 1223 - RNA, 19 nt, Artificial Sequence
  Synthetic Oligonucleotide
ccaacagaggccucuggga

SEQ ID NO: 1224 - RNA, 19 nt, Artificial Sequence
  Synthetic Oligonucleotide
ggccaacagaggccucugg

SEQ ID NO: 1225 - RNA, 19 nt, Artificial Sequence
  Synthetic Oligonucleotide
cauaagcgauuugaagcaa

SEQ ID NO: 1226 - RNA, 19 nt, Artificial Sequence
  Synthetic Oligonucleotide
auggccaacagaggccucu

SEQ ID NO: 1227 - RNA, 19 nt, Artificial Sequence
  Synthetic Oligonucleotide
caacagaggccucugggau

SEQ ID NO: 1228 - RNA, 19 nt, Artificial Sequence
  Synthetic Oligonucleotide
acaacaccaagaccaauca

SEQ ID NO: 1229 - RNA, 19 nt, Artificial Sequence
  Synthetic Oligonucleotide
aaaacaugaagaaaacgag

SEQ ID NO: 1230 - RNA, 19 nt, Artificial Sequence
  Synthetic Oligonucleotide
cuggacaguaguaaacagu

SEQ ID NO: 1231 - RNA, 19 nt, Artificial Sequence
  Synthetic Oligonucleotide
aaagagaaagacaugacca

SEQ ID NO: 1232 - RNA, 19 nt, Artificial Sequence
  Synthetic Oligonucleotide
aaaaacaugaagaaaacga

SEQ ID NO: 1233 - RNA, 19 nt, Artificial Sequence
  Synthetic Oligonucleotide
aagagaaagacaugaccaa

SEQ ID NO: 1234 - RNA, 19 nt, Artificial Sequence
  Synthetic Oligonucleotide
uucacagcagagguguccc

SEQ ID NO: 1235 - RNA, 19 nt, Artificial Sequence
  Synthetic Oligonucleotide
ucacagcagagguguccca

SEQ ID NO: 1236 - RNA, 19 nt, Artificial Sequence
  Synthetic Oligonucleotide
agagaaagacaugaccaaa

SEQ ID NO: 1237 - RNA, 19 nt, Artificial Sequence
  Synthetic Oligonucleotide
uuucauuucaucaaugaac

SEQ ID NO: 1238 - RNA, 19 nt, Artificial Sequence
  Synthetic Oligonucleotide
aggucacuuucaagcugga

SEQ ID NO: 1239 - RNA, 19 nt, Artificial Sequence
  Synthetic Oligonucleotide
ggucacuuucaagcuggau

SEQ ID NO: 1240 - RNA, 19 nt, Artificial Sequence
  Synthetic Oligonucleotide
acauaagcgauuugaagca

SEQ ID NO: 1241 - RNA, 19 nt, Artificial Sequence
  Synthetic Oligonucleotide
uugccgaccaaagucuccc

SEQ ID NO: 1242 - RNA, 19 nt, Artificial Sequence
  Synthetic Oligonucleotide
gagccacauaaaugggaga

SEQ ID NO: 1243 - RNA, 19 nt, Artificial Sequence
  Synthetic Oligonucleotide
gacauaagcgauuugaagc

SEQ ID NO: 1244 - RNA, 19 nt, Artificial Sequence
  Synthetic Oligonucleotide
cuugccgaccaaagucucc

SEQ ID NO: 1245 - RNA, 19 nt, Artificial Sequence
  Synthetic Oligonucleotide
gaaauggccaacagaggcc

SEQ ID NO: 1246 - RNA, 19 nt, Artificial Sequence
  Synthetic Oligonucleotide
acaugaagaaaacgaguca

SEQ ID NO: 1247 - RNA, 19 nt, Artificial Sequence
  Synthetic Oligonucleotide
agacauaagcgauuugaag

SEQ ID NO: 1248 - RNA, 19 nt, Artificial Sequence
  Synthetic Oligonucleotide
aaacaugaagaaaacgagu

SEQ ID NO: 1249 - RNA, 19 nt, Artificial Sequence
  Synthetic Oligonucleotide
uuuucauuucaucaaugaa

SEQ ID NO: 1250 - RNA, 19 nt, Artificial Sequence
  Synthetic Oligonucleotide
agccacauaaaugggagaa

SEQ ID NO: 1251 - RNA, 19 nt, Artificial Sequence
  Synthetic Oligonucleotide
aaauggccaacagaggccu

SEQ ID NO: 1252 - RNA, 19 nt, Artificial Sequence
  Synthetic Oligonucleotide
aacaugaagaaaacgaguc

SEQ ID NO: 1253 - RNA, 19 nt, Artificial Sequence
  Synthetic Oligonucleotide
ggagaaauacuguguccuu

SEQ ID NO: 1254 - RNA, 19 nt, Artificial Sequence
  Synthetic Oligonucleotide
ugggagaaauacugugucc

SEQ ID NO: 1255 - RNA, 19 nt, Artificial Sequence
  Synthetic Oligonucleotide
gggagaaauacuguguccu

SEQ ID NO: 1256 - RNA, 19 nt, Artificial Sequence
  Synthetic Oligonucleotide
agagacauaagcgauuuga

SEQ ID NO: 1257 - RNA, 19 nt, Artificial Sequence
  Synthetic Oligonucleotide
gagaaauacuguguccuug

SEQ ID NO: 1258 - RNA, 19 nt, Artificial Sequence
  Synthetic Oligonucleotide
agaaauacuguguccuuga

SEQ ID NO: 1259 - RNA, 19 nt, Artificial Sequence
  Synthetic Oligonucleotide
gagacauaagcgauuugaa

SEQ ID NO: 1260 - RNA, 19 nt, Artificial Sequence
  Synthetic Oligonucleotide
augggagaaauacuguguc

SEQ ID NO: 1261 - RNA, 19 nt, Artificial Sequence
  Synthetic Oligonucleotide
ugcagaacuaaagagggaa

SEQ ID NO: 1262 - RNA, 19 nt, Artificial Sequence
  Synthetic Oligonucleotide
auuucaucaaugaacaagg

SEQ ID NO: 1263 - RNA, 19 nt, Artificial Sequence
  Synthetic Oligonucleotide
caaagaguuuuuugagaau

SEQ ID NO: 1264 - RNA, 19 nt, Artificial Sequence
  Synthetic Oligonucleotide
cauuucaucaaugaacaag

SEQ ID NO: 1265 - RNA, 19 nt, Artificial Sequence
  Synthetic Oligonucleotide
uucauuucaucaaugaaca

SEQ ID NO: 1266 - RNA, 19 nt, Artificial Sequence
  Synthetic Oligonucleotide
gcagaacuaaagagggaag

SEQ ID NO: 1267 - RNA, 19 nt, Artificial Sequence
  Synthetic Oligonucleotide
ccacauaaaugggagaaau

SEQ ID NO: 1268 - RNA, 19 nt, Artificial Sequence
  Synthetic Oligonucleotide
ucauuucaucaaugaacaa

SEQ ID NO: 1269 - RNA, 19 nt, Artificial Sequence
  Synthetic Oligonucleotide
guuucauguauucagauuu

SEQ ID NO: 1270 - RNA, 19 nt, Artificial Sequence
  Synthetic Oligonucleotide
auaaaugggagaaauacug

SEQ ID NO: 1271 - RNA, 19 nt, Artificial Sequence
  Synthetic Oligonucleotide
cacauaaaugggagaaaua

SEQ ID NO: 1272 - RNA, 19 nt, Artificial Sequence
  Synthetic Oligonucleotide
cauaaaugggagaaauacu

SEQ ID NO: 1273 - RNA, 19 nt, Artificial Sequence
  Synthetic Oligonucleotide
uaaaugggagaaauacugu

SEQ ID NO: 1274 - RNA, 19 nt, Artificial Sequence
  Synthetic Oligonucleotide
uguuucauguauucagauu

SEQ ID NO: 1275 - RNA, 19 nt, Artificial Sequence
  Synthetic Oligonucleotide
acauaaaugggagaaauac

SEQ ID NO: 1276 - RNA, 19 nt, Artificial Sequence
  Synthetic Oligonucleotide
uuucauguauucagauuuu

SEQ ID NO: 1277 - RNA, 19 nt, Artificial Sequence
  Synthetic Oligonucleotide
gagagcaugauugaagccg

SEQ ID NO: 1278 - RNA, 19 nt, Artificial Sequence
  Synthetic Oligonucleotide
gccacauaaaugggagaaa

SEQ ID NO: 1279 - RNA, 19 nt, Artificial Sequence
  Synthetic Oligonucleotide
ucauagaaaaugguuggga

SEQ ID NO: 1280 - RNA, 19 nt, Artificial Sequence
  Synthetic Oligonucleotide
uauaccacaaaugugacaa

SEQ ID NO: 1281 - RNA, 19 nt, Artificial Sequence
  Synthetic Oligonucleotide
uucauagaaaaugguuggg

SEQ ID NO: 1282 - RNA, 19 nt, Artificial Sequence
  Synthetic Oligonucleotide
auauaccacaaaugugaca

SEQ ID NO: 1283 - RNA, 19 nt, Artificial Sequence
  Synthetic Oligonucleotide
ucuuauuucuucggagaca

SEQ ID NO: 1284 - RNA, 19 nt, Artificial Sequence
  Synthetic Oligonucleotide
aaugaaggaucuuauuucu

SEQ ID NO: 1285 - RNA, 19 nt, Artificial Sequence
  Synthetic Oligonucleotide
augaaggaucuuauuucuu

SEQ ID NO: 1286 - RNA, 19 nt, Artificial Sequence
  Synthetic Oligonucleotide
uaaugaaggaucuuauuuc

SEQ ID NO: 1287 - RNA, 19 nt, Artificial Sequence
  Synthetic Oligonucleotide
uuauuucuucggagacaau

SEQ ID NO: 1288 - RNA, 19 nt, Artificial Sequence
  Synthetic Oligonucleotide
cuuauuucuucggagacaa

SEQ ID NO: 1289 - RNA, 19 nt, Artificial Sequence
  Synthetic Oligonucleotide
auuucuucggagacaaugc

SEQ ID NO: 1290 - RNA, 19 nt, Artificial Sequence
  Synthetic Oligonucleotide
uauuucuucggagacaaug

SEQ ID NO: 1291 - RNA, 19 nt, Artificial Sequence
  Synthetic Oligonucleotide
uuucuucggagacaaugca

SEQ ID NO: 1292 - RNA, 19 nt, Artificial Sequence
  Synthetic Oligonucleotide
ugaaggaucuuauuucuuc

SEQ ID NO: 1293 - RNA, 19 nt, Artificial Sequence
  Synthetic Oligonucleotide
gaaggaucuuauuucuucg

SEQ ID NO: 1294 - RNA, 19 nt, Artificial Sequence
  Synthetic Oligonucleotide
aaggaucuuauuucuucgg

SEQ ID NO: 1295 - RNA, 19 nt, Artificial Sequence
  Synthetic Oligonucleotide
uucuucggagacaaugcag

SEQ ID NO: 1296 - RNA, 19 nt, Artificial Sequence
  Synthetic Oligonucleotide
ucuucggagacaaugcaga

SEQ ID NO: 1297 - RNA, 19 nt, Artificial Sequence
  Synthetic Oligonucleotide
aggaucuuauuucuucgga

SEQ ID NO: 1298 - RNA, 19 nt, Artificial Sequence
  Synthetic Oligonucleotide
gaucuuauuucuucggaga

SEQ ID NO: 1299 - RNA, 19 nt, Artificial Sequence
  Synthetic Oligonucleotide
ggaucuuauuucuucggag

SEQ ID NO: 1300 - RNA, 19 nt, Artificial Sequence
  Synthetic Oligonucleotide
aucuuauuucuucggagac

SEQ ID NO: 1301 - RNA, 19 nt, Artificial Sequence
  Synthetic Oligonucleotide
aguaaugaaggaucuuauu

SEQ ID NO: 1302 - RNA, 19 nt, Artificial Sequence
  Synthetic Oligonucleotide
guaaugaaggaucuuauuu

SEQ ID NO: 1303 - RNA, 19 nt, Artificial Sequence
  Synthetic Oligonucleotide
auggugcucucugcuuuug

SEQ ID NO: 1304 - RNA, 19 nt, Artificial Sequence
  Synthetic Oligonucleotide
ugaguaaugaaggaucuua

SEQ ID NO: 1305 - RNA, 19 nt, Artificial Sequence
  Synthetic Oligonucleotide
uggugcucucugcuuuuga

SEQ ID NO: 1306 - RNA, 19 nt, Artificial Sequence
  Synthetic Oligonucleotide
gaguaaugaaggaucuuau

SEQ ID NO: 1307 - RNA, 19 nt, Artificial Sequence
  Synthetic Oligonucleotide
augaguaaugaaggaucuu

SEQ ID NO: 1308 - RNA, 19 nt, Artificial Sequence
  Synthetic Oligonucleotide
aaauuucaaacagcugcac

SEQ ID NO: 1309 - RNA, 19 nt, Artificial Sequence
  Synthetic Oligonucleotide
aauuucaaacagcugcaca

SEQ ID NO: 1310 - RNA, 19 nt, Artificial Sequence
  Synthetic Oligonucleotide
uacaaauugcuucaaauga

SEQ ID NO: 1311 - RNA, 19 nt, Artificial Sequence
  Synthetic Oligonucleotide
auuucaaacagcugcacaa

SEQ ID NO: 1312 - RNA, 19 nt, Artificial Sequence
  Synthetic Oligonucleotide
uuucaaacagcugcacaaa

SEQ ID NO: 1313 - RNA, 19 nt, Artificial Sequence
  Synthetic Oligonucleotide
aauggugcucucugcuuuu

SEQ ID NO: 1314 - RNA, 19 nt, Artificial Sequence
  Synthetic Oligonucleotide
aaggcaccaaacggucuua

SEQ ID NO: 1315 - RNA, 19 nt, Artificial Sequence
  Synthetic Oligonucleotide
caaggcaccaaacggucuu

SEQ ID NO: 1316 - RNA, 19 nt, Artificial Sequence
  Synthetic Oligonucleotide
cgaacccgaucgugcccuc

SEQ ID NO: 1317 - RNA, 19 nt, Artificial Sequence
  Synthetic Oligonucleotide
guacaaauugcuucaaaug

SEQ ID NO: 1318 - RNA, 19 nt, Artificial Sequence
  Synthetic Oligonucleotide
caacgaacccgaucgugcc

SEQ ID NO: 1319 - RNA, 19 nt, Artificial Sequence
  Synthetic Oligonucleotide
gcaacgaacccgaucgugc

SEQ ID NO: 1320 - RNA, 19 nt, Artificial Sequence
  Synthetic Oligonucleotide
gauucuacauccaaaugug

SEQ ID NO: 1321 - RNA, 19 nt, Artificial Sequence
  Synthetic Oligonucleotide
ggcaacgaacccgaucgug

SEQ ID NO: 1322 - RNA, 19 nt, Artificial Sequence
  Synthetic Oligonucleotide
uggaucaagugagagaaag

SEQ ID NO: 1323 - RNA, 19 nt, Artificial Sequence
  Synthetic Oligonucleotide
ucauggcagcauucacugg

SEQ ID NO: 1324 - RNA, 19 nt, Artificial Sequence
  Synthetic Oligonucleotide
ucagacaugagggcagaaa

SEQ ID NO: 1325 - RNA, 19 nt, Artificial Sequence
  Synthetic Oligonucleotide
cagacaugagggcagaaau

SEQ ID NO: 1326 - RNA, 19 nt, Artificial Sequence
  Synthetic Oligonucleotide
aaugcugagaucgaagauc

SEQ ID NO: 1327 - RNA, 19 nt, Artificial Sequence
  Synthetic Oligonucleotide
augcugagaucgaagaucu

SEQ ID NO: 1328 - RNA, 19 nt, Artificial Sequence
  Synthetic Oligonucleotide
gcugagaucgaagaucuca

SEQ ID NO: 1329 - RNA, 19 nt, Artificial Sequence
  Synthetic Oligonucleotide
ugcugagaucgaagaucuc

SEQ ID NO: 1330 - RNA, 19 nt, Artificial Sequence
  Synthetic Oligonucleotide
uucuacauccaaaugugca

SEQ ID NO: 1331 - RNA, 19 nt, Artificial Sequence
  Synthetic Oligonucleotide
ucuacauccaaaugugcac

SEQ ID NO: 1332 - RNA, 19 nt, Artificial Sequence
  Synthetic Oligonucleotide
agggaacucguccuuuaug

SEQ ID NO: 1333 - RNA, 19 nt, Artificial Sequence
  Synthetic Oligonucleotide
gggaacucguccuuuauga

SEQ ID NO: 1334 - RNA, 19 nt, Artificial Sequence
  Synthetic Oligonucleotide
augagagaaugugcaacau

SEQ ID NO: 1335 - RNA, 19 nt, Artificial Sequence
  Synthetic Oligonucleotide
uaugagagaaugugcaaca

SEQ ID NO: 1336 - RNA, 19 nt, Artificial Sequence
  Synthetic Oligonucleotide
ugagggaacucguccuuua

SEQ ID NO: 1337 - RNA, 19 nt, Artificial Sequence
  Synthetic Oligonucleotide
gagggaacucguccuuuau

SEQ ID NO: 1338 - RNA, 19 nt, Artificial Sequence
  Synthetic Oligonucleotide
auucugcugcauuugaaga

SEQ ID NO: 1339 - RNA, 19 nt, Artificial Sequence
  Synthetic Oligonucleotide
gaaaugcugagaucgaaga

SEQ ID NO: 1340 - RNA, 19 nt, Artificial Sequence
  Synthetic Oligonucleotide
auucuacauccaaaugugc

SEQ ID NO: 1341 - RNA, 19 nt, Artificial Sequence
  Synthetic Oligonucleotide
ggaaaugcugagaucgaag

SEQ ID NO: 1342 - RNA, 19 nt, Artificial Sequence
  Synthetic Oligonucleotide
aaaugcugagaucgaagau

SEQ ID NO: 1343 - RNA, 19 nt, Artificial Sequence
  Synthetic Oligonucleotide
aggaaaugcugagaucgaa

SEQ ID NO: 1344 - RNA, 19 nt, Artificial Sequence
  Synthetic Oligonucleotide
ccaggaaaugcugagaucg

SEQ ID NO: 1345 - RNA, 19 nt, Artificial Sequence
  Synthetic Oligonucleotide
caggaaaugcugagaucga

SEQ ID NO: 1346 - RNA, 19 nt, Artificial Sequence
  Synthetic Oligonucleotide
ggaacccaggaaaugcuga

SEQ ID NO: 1347 - RNA, 19 nt, Artificial Sequence
  Synthetic Oligonucleotide
augagggcagaaaucauaa

SEQ ID NO: 1348 - RNA, 19 nt, Artificial Sequence
  Synthetic Oligonucleotide
uucugcugcauuugaagau

SEQ ID NO: 1349 - RNA, 19 nt, Artificial Sequence
  Synthetic Oligonucleotide
acaugagggcagaaaucau

SEQ ID NO: 1350 - RNA, 19 nt, Artificial Sequence
  Synthetic Oligonucleotide
gacaugagggcagaaauca

SEQ ID NO: 1351 - RNA, 19 nt, Artificial Sequence
  Synthetic Oligonucleotide
cggaacccaggaaaugcug

SEQ ID NO: 1352 - RNA, 19 nt, Artificial Sequence
  Synthetic Oligonucleotide
caugagggcagaaaucaua

SEQ ID NO: 1353 - RNA, 19 nt, Artificial Sequence
  Synthetic Oligonucleotide
agacaugagggcagaaauc

SEQ ID NO: 1354 - RNA, 19 nt, Artificial Sequence
  Synthetic Oligonucleotide
acccaggaaaugcugagau

SEQ ID NO: 1355 - RNA, 19 nt, Artificial Sequence
  Synthetic Oligonucleotide
aacccaggaaaugcugaga

SEQ ID NO: 1356 - RNA, 19 nt, Artificial Sequence
  Synthetic Oligonucleotide
gaaaauuucaaacagcugc

SEQ ID NO: 1357 - RNA, 19 nt, Artificial Sequence
  Synthetic Oligonucleotide
ggaaaauuucaaacagcug

SEQ ID NO: 1358 - RNA, 19 nt, Artificial Sequence
  Synthetic Oligonucleotide
aaaggaaaauuucaaacag

SEQ ID NO: 1359 - RNA, 19 nt, Artificial Sequence
  Synthetic Oligonucleotide
aggaaaauuucaaacagcu

SEQ ID NO: 1360 - RNA, 19 nt, Artificial Sequence
  Synthetic Oligonucleotide
aaggaaaauuucaaacagc

SEQ ID NO: 1361 - RNA, 19 nt, Artificial Sequence
  Synthetic Oligonucleotide
acuucgaaaaagagggaua

SEQ ID NO: 1362 - RNA, 19 nt, Artificial Sequence
  Synthetic Oligonucleotide
aaaauuucaaacagcugca

SEQ ID NO: 1363 - RNA, 19 nt, Artificial Sequence
  Synthetic Oligonucleotide
cccaggaaaugcugagauc

SEQ ID NO: 1364 - RNA, 19 nt, Artificial Sequence
  Synthetic Oligonucleotide
agagggucaguugcucaca

SEQ ID NO: 1365 - RNA, 19 nt, Artificial Sequence
  Synthetic Oligonucleotide
gagggucaguugcucacaa

SEQ ID NO: 1366 - RNA, 19 nt, Artificial Sequence
  Synthetic Oligonucleotide
gaacccaggaaaugcugag

SEQ ID NO: 1367 - RNA, 19 nt, Artificial Sequence
  Synthetic Oligonucleotide
acgacuucgaaaaagaggg

SEQ ID NO: 1368 - RNA, 19 nt, Artificial Sequence
  Synthetic Oligonucleotide
uacgacuucgaaaaagagg

SEQ ID NO: 1369 - RNA, 19 nt, Artificial Sequence
  Synthetic Oligonucleotide
gacuucgaaaaagagggau

SEQ ID NO: 1370 - RNA, 19 nt, Artificial Sequence
  Synthetic Oligonucleotide
agaggacaagagcucuugu

SEQ ID NO: 1371 - RNA, 19 nt, Artificial Sequence
  Synthetic Oligonucleotide
cagaggacaagagcucuug

SEQ ID NO: 1372 - RNA, 19 nt, Artificial Sequence
  Synthetic Oligonucleotide
aguggguacgacuucgaaa

SEQ ID NO: 1373 - RNA, 19 nt, Artificial Sequence
  Synthetic Oligonucleotide
cgacuucgaaaaagaggga

SEQ ID NO: 1374 - RNA, 19 nt, Artificial Sequence
  Synthetic Oligonucleotide
caguggguacgacuucgaa

SEQ ID NO: 1375 - RNA, 19 nt, Artificial Sequence
  Synthetic Oligonucleotide
ccaguggguacgacuucga

SEQ ID NO: 1376 - RNA, 19 nt, Artificial Sequence
  Synthetic Oligonucleotide
guggguacgacuucgaaaa

SEQ ID NO: 1377 - RNA, 19 nt, Artificial Sequence
  Synthetic Oligonucleotide
ggaguacaaauugcuucaa

SEQ ID NO: 1378 - RNA, 19 nt, Artificial Sequence
  Synthetic Oligonucleotide
gaguacaaauugcuucaaa

SEQ ID NO: 1379 - RNA, 19 nt, Artificial Sequence
  Synthetic Oligonucleotide
aguacaaauugcuucaaau

SEQ ID NO: 1380 - RNA, 19 nt, Artificial Sequence
  Synthetic Oligonucleotide
ugcuuaugagagaaugugc

SEQ ID NO: 1381 - RNA, 19 nt, Artificial Sequence
  Synthetic Oligonucleotide
gcuuaugagagaaugugca

SEQ ID NO: 1382 - RNA, 19 nt, Artificial Sequence
  Synthetic Oligonucleotide
cuuaugagagaaugugcaa

SEQ ID NO: 1383 - RNA, 19 nt, Artificial Sequence
  Synthetic Oligonucleotide
gaggaguacaaauugcuuc

SEQ ID NO: 1384 - RNA, 19 nt, Artificial Sequence
  Synthetic Oligonucleotide
agaggaguacaaauugcuu

SEQ ID NO: 1385 - RNA, 19 nt, Artificial Sequence
  Synthetic Oligonucleotide
aggaguacaaauugcuuca

SEQ ID NO: 1386 - RNA, 19 nt, Artificial Sequence
  Synthetic Oligonucleotide
ggguacgacuucgaaaaag

SEQ ID NO: 1387 - RNA, 19 nt, Artificial Sequence
  Synthetic Oligonucleotide
gguacgacuucgaaaaaga

SEQ ID NO: 1388 - RNA, 19 nt, Artificial Sequence
  Synthetic Oligonucleotide
uggguacgacuucgaaaaa

SEQ ID NO: 1389 - RNA, 19 nt, Artificial Sequence
  Synthetic Oligonucleotide
guacgacuucgaaaaagag

SEQ ID NO: 1390 - RNA, 19 nt, Artificial Sequence
  Synthetic Oligonucleotide
uaugaacagauggaaacug

SEQ ID NO: 1391 - RNA, 19 nt, Artificial Sequence
  Synthetic Oligonucleotide
cuuaugaacagauggaaac

SEQ ID NO: 1392 - RNA, 19 nt, Artificial Sequence
  Synthetic Oligonucleotide
ucuuaugaacagauggaaa

SEQ ID NO: 1393 - RNA, 19 nt, Artificial Sequence
  Synthetic Oligonucleotide
uuaugaacagauggaaacu

SEQ ID NO: 1394 - RNA, 19 nt, Artificial Sequence
  Synthetic Oligonucleotide
agagaaugugcaacauucu

SEQ ID NO: 1395 - RNA, 19 nt, Artificial Sequence
  Synthetic Oligonucleotide
gagagaaugugcaacauuc

SEQ ID NO: 1396 - RNA, 19 nt, Artificial Sequence
  Synthetic Oligonucleotide
uucaaacagcugcacaaag

SEQ ID NO: 1397 - RNA, 19 nt, Artificial Sequence
  Synthetic Oligonucleotide
cuagaggaguacaaauugc

SEQ ID NO: 1398 - RNA, 19 nt, Artificial Sequence
  Synthetic Oligonucleotide
acuagaggaguacaaauug

SEQ ID NO: 1399 - RNA, 19 nt, Artificial Sequence
  Synthetic Oligonucleotide
uagaggaguacaaauugcu

SEQ ID NO: 1400 - RNA, 19 nt, Artificial Sequence
  Synthetic Oligonucleotide
accagaggacaagagcucu

SEQ ID NO: 1401 - RNA, 19 nt, Artificial Sequence
  Synthetic Oligonucleotide
uaccagaggacaagagcuc

SEQ ID NO: 1402 - RNA, 19 nt, Artificial Sequence
  Synthetic Oligonucleotide
aguggaggaaacacuaauc

SEQ ID NO: 1403 - RNA, 19 nt, Artificial Sequence
  Synthetic Oligonucleotide
guggaggaaacacuaauca

SEQ ID NO: 1404 - RNA, 19 nt, Artificial Sequence
  Synthetic Oligonucleotide
gaggaaacacuaaucaaca

SEQ ID NO: 1405 - RNA, 19 nt, Artificial Sequence
  Synthetic Oligonucleotide
ggaggaaacacuaaucaac

SEQ ID NO: 1406 - RNA, 19 nt, Artificial Sequence
  Synthetic Oligonucleotide
ccagaggacaagagcucuu

SEQ ID NO: 1407 - RNA, 19 nt, Artificial Sequence
  Synthetic Oligonucleotide
uggaggaaacacuaaucaa

SEQ ID NO: 1408 - RNA, 19 nt, Artificial Sequence
  Synthetic Oligonucleotide
acgaacccgaucgugcccu

SEQ ID NO: 1409 - RNA, 19 nt, Artificial Sequence
  Synthetic Oligonucleotide
gugcucucugcuuuugaug

SEQ ID NO: 1410 - RNA, 19 nt, Artificial Sequence
  Synthetic Oligonucleotide
ggugcucucugcuuuugau

SEQ ID NO: 1411 - RNA, 19 nt, Artificial Sequence
  Synthetic Oligonucleotide
ugcucucugcuuuugauga

SEQ ID NO: 1412 - RNA, 19 nt, Artificial Sequence
  Synthetic Oligonucleotide
aacgaacccgaucgugccc

SEQ ID NO: 1413 - RNA, 19 nt, Artificial Sequence
  Synthetic Oligonucleotide
gagaauccagcacacaaga

SEQ ID NO: 1414 - RNA, 19 nt, Artificial Sequence
  Synthetic Oligonucleotide
agaauccagcacacaagag

SEQ ID NO: 1415 - RNA, 19 nt, Artificial Sequence
  Synthetic Oligonucleotide
caaacagcugcacaaagag

SEQ ID NO: 1416 - RNA, 19 nt, Artificial Sequence
  Synthetic Oligonucleotide
aaacagcugcacaaagagc

SEQ ID NO: 1417 - RNA, 19 nt, Artificial Sequence
  Synthetic Oligonucleotide
auggcgucccaaggcacca

SEQ ID NO: 1418 - RNA, 19 nt, Artificial Sequence
  Synthetic Oligonucleotide
ucaaacagcugcacaaaga

SEQ ID NO: 1419 - RNA, 19 nt, Artificial Sequence
  Synthetic Oligonucleotide
cgucccaaggcaccaaacg

SEQ ID NO: 1420 - RNA, 19 nt, Artificial Sequence
  Synthetic Oligonucleotide
ggcgucccaaggcaccaaa

SEQ ID NO: 1421 - RNA, 19 nt, Artificial Sequence
  Synthetic Oligonucleotide
gcgucccaaggcaccaaac

SEQ ID NO: 1422 - RNA, 19 nt, Artificial Sequence
  Synthetic Oligonucleotide
uggcgucccaaggcaccaa

SEQ ID NO: 1423 - RNA, 19 nt, Artificial Sequence
  Synthetic Oligonucleotide
aagaagaaauaaggcgaau

SEQ ID NO: 1424 - RNA, 19 nt, Artificial Sequence
  Synthetic Oligonucleotide
aaagaagaaauaaggcgaa

SEQ ID NO: 1425 - RNA, 19 nt, Artificial Sequence
  Synthetic Oligonucleotide
uuaugagagaaugugcaac

SEQ ID NO: 1426 - RNA, 19 nt, Artificial Sequence
  Synthetic Oligonucleotide
agcugcacaaagagcaaug

SEQ ID NO: 1427 - RNA, 19 nt, Artificial Sequence
  Synthetic Oligonucleotide
aaggcaacgaacccgaucg

SEQ ID NO: 1428 - RNA, 19 nt, Artificial Sequence
  Synthetic Oligonucleotide
aggcaacgaacccgaucgu

SEQ ID NO: 1429 - RNA, 19 nt, Artificial Sequence
  Synthetic Oligonucleotide
cagcugcacaaagagcaau

SEQ ID NO: 1430 - RNA, 19 nt, Artificial Sequence
  Synthetic Oligonucleotide
uauugagagggucaguugc

SEQ ID NO: 1431 - RNA, 19 nt, Artificial Sequence
  Synthetic Oligonucleotide
acagcugcacaaagagcaa

SEQ ID NO: 1432 - RNA, 19 nt, Artificial Sequence
  Synthetic Oligonucleotide
aacagcugcacaaagagca

SEQ ID NO: 1433 - RNA, 19 nt, Artificial Sequence
  Synthetic Oligonucleotide
cccagcgcggggaaagauc

SEQ ID NO: 1434 - RNA, 19 nt, Artificial Sequence
  Synthetic Oligonucleotide
ccagcgcggggaaagaucc

SEQ ID NO: 1435 - RNA, 19 nt, Artificial Sequence
  Synthetic Oligonucleotide
cagcugguguggauggcau

SEQ ID NO: 1436 - RNA, 19 nt, Artificial Sequence
  Synthetic Oligonucleotide
agcugguguggauggcaug

SEQ ID NO: 1437 - RNA, 19 nt, Artificial Sequence
  Synthetic Oligonucleotide
gcugguguggauggcaugc

SEQ ID NO: 1438 - RNA, 19 nt, Artificial Sequence
  Synthetic Oligonucleotide
ucccaaggcaccaaacggu

SEQ ID NO: 1439 - RNA, 19 nt, Artificial Sequence
  Synthetic Oligonucleotide
cccaaggcaccaaacgguc

SEQ ID NO: 1440 - RNA, 19 nt, Artificial Sequence
  Synthetic Oligonucleotide
gucccaaggcaccaaacgg

SEQ ID NO: 1441 - RNA, 19 nt, Artificial Sequence
  Synthetic Oligonucleotide
ugagagaaugugcaacauu

SEQ ID NO: 1442 - RNA, 19 nt, Artificial Sequence
  Synthetic Oligonucleotide
auccagcacacaagaguca

SEQ ID NO: 1443 - RNA, 19 nt, Artificial Sequence
  Synthetic Oligonucleotide
aauccagcacacaagaguc

SEQ ID NO: 1444 - RNA, 19 nt, Artificial Sequence
  Synthetic Oligonucleotide
gaauccagcacacaagagu

SEQ ID NO: 1445 - RNA, 19 nt, Artificial Sequence
  Synthetic Oligonucleotide
acgagaauccagcacacaa

SEQ ID NO: 1446 - RNA, 19 nt, Artificial Sequence
  Synthetic Oligonucleotide
auauugagagggucaguug

SEQ ID NO: 1447 - RNA, 19 nt, Artificial Sequence
  Synthetic Oligonucleotide
aacgagaauccagcacaca

SEQ ID NO: 1448 - RNA, 19 nt, Artificial Sequence
  Synthetic Oligonucleotide
ccaaggcaccaaacggucu

SEQ ID NO: 1449 - RNA, 19 nt, Artificial Sequence
  Synthetic Oligonucleotide
cagcacacaagagucagcu

SEQ ID NO: 1450 - RNA, 19 nt, Artificial Sequence
  Synthetic Oligonucleotide
ccagcacacaagagucagc

SEQ ID NO: 1451 - RNA, 19 nt, Artificial Sequence
  Synthetic Oligonucleotide
cgagaauccagcacacaag

SEQ ID NO: 1452 - RNA, 19 nt, Artificial Sequence
  Synthetic Oligonucleotide
agucagcugguguggaugg

SEQ ID NO: 1453 - RNA, 19 nt, Artificial Sequence
  Synthetic Oligonucleotide
gucagcugguguggauggc

SEQ ID NO: 1454 - RNA, 19 nt, Artificial Sequence
  Synthetic Oligonucleotide
gcacacaagagucagcugg

SEQ ID NO: 1455 - RNA, 19 nt, Artificial Sequence
  Synthetic Oligonucleotide
cacacaagagucagcuggu

SEQ ID NO: 1456 - RNA, 19 nt, Artificial Sequence
  Synthetic Oligonucleotide
ucagcugguguggauggca

SEQ ID NO: 1457 - RNA, 19 nt, Artificial Sequence
  Synthetic Oligonucleotide
agcacacaagagucagcug

SEQ ID NO: 1458 - RNA, 19 nt, Artificial Sequence
  Synthetic Oligonucleotide
uccagcacacaagagucag

SEQ ID NO: 1459 - RNA, 19 nt, Artificial Sequence
  Synthetic Oligonucleotide
aagagucagcuggugugga

SEQ ID NO: 1460 - RNA, 19 nt, Artificial Sequence
  Synthetic Oligonucleotide
agagucagcugguguggau

SEQ ID NO: 1461 - RNA, 19 nt, Artificial Sequence
  Synthetic Oligonucleotide
gagucagcugguguggaug

SEQ ID NO: 1462 - RNA, 19 nt, Artificial Sequence
  Synthetic Oligonucleotide
acaagagucagcuggugug

SEQ ID NO: 1463 - RNA, 19 nt, Artificial Sequence
  Synthetic Oligonucleotide
caagagucagcuggugugg

SEQ ID NO: 1464 - RNA, 19 nt, Artificial Sequence
  Synthetic Oligonucleotide
cacaagagucagcuggugu

SEQ ID NO: 1465 - RNA, 19 nt, Artificial Sequence
  Synthetic Oligonucleotide
cugagaucgaagaucucau

SEQ ID NO: 1466 - RNA, 19 nt, Artificial Sequence
  Synthetic Oligonucleotide
acacaagagucagcuggug

SEQ ID NO: 1467 - RNA, 19 nt, Artificial Sequence
  Synthetic Oligonucleotide
ggaaacacuaaucaacaga

SEQ ID NO: 1468 - RNA, 19 nt, Artificial Sequence
  Synthetic Oligonucleotide
gaaauaaggcgaaucuggc

SEQ ID NO: 1469 - RNA, 19 nt, Artificial Sequence
  Synthetic Oligonucleotide
aaauaaggcgaaucuggcg

SEQ ID NO: 1470 - RNA, 19 nt, Artificial Sequence
  Synthetic Oligonucleotide
caaauugcuucaaaugaga

SEQ ID NO: 1471 - RNA, 19 nt, Artificial Sequence
  Synthetic Oligonucleotide
gcuucaaaugagaacaugg

SEQ ID NO: 1472 - RNA, 19 nt, Artificial Sequence
  Synthetic Oligonucleotide
accaaacggucuuaugaac

SEQ ID NO: 1473 - RNA, 19 nt, Artificial Sequence
  Synthetic Oligonucleotide
ccaaacggucuuaugaaca

SEQ ID NO: 1474 - RNA, 19 nt, Artificial Sequence
  Synthetic Oligonucleotide
cuucaaaugagaacaugga

SEQ ID NO: 1475 - RNA, 19 nt, Artificial Sequence
  Synthetic Oligonucleotide
ggcaccaaacggucuuaug

SEQ ID NO: 1476 - RNA, 19 nt, Artificial Sequence
  Synthetic Oligonucleotide
gcaccaaacggucuuauga

SEQ ID NO: 1477 - RNA, 19 nt, Artificial Sequence
  Synthetic Oligonucleotide
aggcaccaaacggucuuau

SEQ ID NO: 1478 - RNA, 19 nt, Artificial Sequence
  Synthetic Oligonucleotide
caccaaacggucuuaugaa

SEQ ID NO: 1479 - RNA, 19 nt, Artificial Sequence
  Synthetic Oligonucleotide
uugcuucaaaugagaacau

SEQ ID NO: 1480 - RNA, 19 nt, Artificial Sequence
  Synthetic Oligonucleotide
ugcuucaaaugagaacaug

SEQ ID NO: 1481 - RNA, 19 nt, Artificial Sequence
  Synthetic Oligonucleotide
aaauugcuucaaaugagaa

SEQ ID NO: 1482 - RNA, 19 nt, Artificial Sequence
  Synthetic Oligonucleotide
auugcuucaaaugagaaca

SEQ ID NO: 1483 - RNA, 19 nt, Artificial Sequence
  Synthetic Oligonucleotide
aauugcuucaaaugagaac

SEQ ID NO: 1484 - RNA, 19 nt, Artificial Sequence
  Synthetic Oligonucleotide
agaaauaaggcgaaucugg

SEQ ID NO: 1485 - RNA, 19 nt, Artificial Sequence
  Synthetic Oligonucleotide
gaagaaauaaggcgaaucu

SEQ ID NO: 1486 - RNA, 19 nt, Artificial Sequence
  Synthetic Oligonucleotide
gaacccgaucgugcccucu

SEQ ID NO: 1487 - RNA, 19 nt, Artificial Sequence
  Synthetic Oligonucleotide
ggucuuaugaacagaugga

SEQ ID NO: 1488 - RNA, 19 nt, Artificial Sequence
  Synthetic Oligonucleotide
aacccgaucgugcccucuu

SEQ ID NO: 1489 - RNA, 19 nt, Artificial Sequence
  Synthetic Oligonucleotide
cccgaucgugcccucuuuu

SEQ ID NO: 1490 - RNA, 19 nt, Artificial Sequence
  Synthetic Oligonucleotide
acccgaucgugcccucuuu

SEQ ID NO: 1491 - RNA, 19 nt, Artificial Sequence
  Synthetic Oligonucleotide
aagaaauaaggcgaaucug

SEQ ID NO: 1492 - RNA, 19 nt, Artificial Sequence
  Synthetic Oligonucleotide
cggucuuaugaacagaugg

SEQ ID NO: 1493 - RNA, 19 nt, Artificial Sequence
  Synthetic Oligonucleotide
acggucuuaugaacagaug

SEQ ID NO: 1494 - RNA, 19 nt, Artificial Sequence
  Synthetic Oligonucleotide
cgaucgugcccucuuuuga

SEQ ID NO: 1495 - RNA, 19 nt, Artificial Sequence
  Synthetic Oligonucleotide
ccgaucgugcccucuuuug

SEQ ID NO: 1496 - RNA, 19 nt, Artificial Sequence
  Synthetic Oligonucleotide
caaacggucuuaugaacag

SEQ ID NO: 1497 - RNA, 19 nt, Artificial Sequence
  Synthetic Oligonucleotide
aacggucuuaugaacagau

SEQ ID NO: 1498 - RNA, 19 nt, Artificial Sequence
  Synthetic Oligonucleotide
aaacggucuuaugaacaga

SEQ ID NO: 1499 - RNA, 19 nt, Artificial Sequence
  Synthetic Oligonucleotide
agaagaaauaaggcgaauc

SEQ ID NO: 1500 - RNA, 19 nt, Artificial Sequence
  Synthetic Oligonucleotide
gaaacacuaaucaacagag

SEQ ID NO: 1501 - RNA, 19 nt, Artificial Sequence
  Synthetic Oligonucleotide
uggaugagggaacucgucc

SEQ ID NO: 1502 - RNA, 19 nt, Artificial Sequence
  Synthetic Oligonucleotide
ggaugagggaacucguccu

SEQ ID NO: 1503 - RNA, 19 nt, Artificial Sequence
  Synthetic Oligonucleotide
gaugagggaacucguccuu

SEQ ID NO: 1504 - RNA, 19 nt, Artificial Sequence
  Synthetic Oligonucleotide
augagggaacucguccuuu

SEQ ID NO: 1505 - RNA, 19 nt, Artificial Sequence
  Synthetic Oligonucleotide
aggaaacacuaaucaacag

SEQ ID NO: 1506 - RNA, 19 nt, Artificial Sequence
  Synthetic Oligonucleotide
aacacuaaucaacagaggg

SEQ ID NO: 1507 - RNA, 19 nt, Artificial Sequence
  Synthetic Oligonucleotide
acacuaaucaacagagggc

SEQ ID NO: 1508 - RNA, 19 nt, Artificial Sequence
  Synthetic Oligonucleotide
uacucuugaacugagaagc

SEQ ID NO: 1509 - RNA, 19 nt, Artificial Sequence
  Synthetic Oligonucleotide
aaacacuaaucaacagagg

SEQ ID NO: 1510 - RNA, 19 nt, Artificial Sequence
  Synthetic Oligonucleotide
ugagggcagaaaucauaag

SEQ ID NO: 1511 - RNA, 19 nt, Artificial Sequence
  Synthetic Oligonucleotide
augugcucucugaugcagg

SEQ ID NO: 1512 - RNA, 19 nt, Artificial Sequence
  Synthetic Oligonucleotide
ugugcucucugaugcaggg

SEQ ID NO: 1513 - RNA, 19 nt, Artificial Sequence
  Synthetic Oligonucleotide
guacucuugaacugagaag

SEQ ID NO: 1514 - RNA, 19 nt, Artificial Sequence
  Synthetic Oligonucleotide
gagagggucaguugcucac

SEQ ID NO: 1515 - RNA, 19 nt, Artificial Sequence
  Synthetic Oligonucleotide
aguacucuugaacugagaa

SEQ ID NO: 1516 - RNA, 19 nt, Artificial Sequence
  Synthetic Oligonucleotide
ugagagggucaguugcuca

SEQ ID NO: 1517 - RNA, 19 nt, Artificial Sequence
  Synthetic Oligonucleotide
cugaacuuaaacucaguga

SEQ ID NO: 1518 - RNA, 19 nt, Artificial Sequence
  Synthetic Oligonucleotide
ugaacuuaaacucagugau

SEQ ID NO: 1519 - RNA, 19 nt, Artificial Sequence
  Synthetic Oligonucleotide
uugagagggucaguugcuc

SEQ ID NO: 1520 - RNA, 19 nt, Artificial Sequence
  Synthetic Oligonucleotide
acugaacuuaaacucagug

SEQ ID NO: 1521 - RNA, 19 nt, Artificial Sequence
  Synthetic Oligonucleotide
auugagagggucaguugcu

SEQ ID NO: 1522 - RNA, 19 nt, Artificial Sequence
  Synthetic Oligonucleotide
auggaaggugcaaaaccag

SEQ ID NO: 1523 - RNA, 19 nt, Artificial Sequence
  Synthetic Oligonucleotide
uggaaggugcaaaaccaga

SEQ ID NO: 1524 - RNA, 19 nt, Artificial Sequence
  Synthetic Oligonucleotide
ugauggaaggugcaaaacc

SEQ ID NO: 1525 - RNA, 19 nt, Artificial Sequence
  Synthetic Oligonucleotide
augauggaaggugcaaaac

SEQ ID NO: 1526 - RNA, 19 nt, Artificial Sequence
  Synthetic Oligonucleotide
gauggaaggugcaaaacca

SEQ ID NO: 1527 - RNA, 19 nt, Artificial Sequence
  Synthetic Oligonucleotide
gccagaaugcaacugagau

SEQ ID NO: 1528 - RNA, 19 nt, Artificial Sequence
  Synthetic Oligonucleotide
cgccagaaugcaacugaga

SEQ ID NO: 1529 - RNA, 19 nt, Artificial Sequence
  Synthetic Oligonucleotide
aacagauggaaacugaugg

SEQ ID NO: 1530 - RNA, 19 nt, Artificial Sequence
  Synthetic Oligonucleotide
gaacagauggaaacugaug

SEQ ID NO: 1531 - RNA, 19 nt, Artificial Sequence
  Synthetic Oligonucleotide
uaagcuucaucagagggac

SEQ ID NO: 1532 - RNA, 19 nt, Artificial Sequence
  Synthetic Oligonucleotide
augaacagauggaaacuga

SEQ ID NO: 1533 - RNA, 19 nt, Artificial Sequence
  Synthetic Oligonucleotide
ugaacagauggaaacugau

SEQ ID NO: 1534 - RNA, 19 nt, Artificial Sequence
  Synthetic Oligonucleotide
auccuaagaaaacuggagg

SEQ ID NO: 1535 - RNA, 19 nt, Artificial Sequence
  Synthetic Oligonucleotide
uuaagcuucaucagaggga

SEQ ID NO: 1536 - RNA, 19 nt, Artificial Sequence
  Synthetic Oligonucleotide
gauccuaagaaaacuggag

SEQ ID NO: 1537 - RNA, 19 nt, Artificial Sequence
  Synthetic Oligonucleotide
cuaaucaacagagggccuc

SEQ ID NO: 1538 - RNA, 19 nt, Artificial Sequence
  Synthetic Oligonucleotide
acuaaucaacagagggccu

SEQ ID NO: 1539 - RNA, 19 nt, Artificial Sequence
  Synthetic Oligonucleotide
acugggccauaaggaccag

SEQ ID NO: 1540 - RNA, 19 nt, Artificial Sequence
  Synthetic Oligonucleotide
uacugggccauaaggacca

SEQ ID NO: 1541 - RNA, 19 nt, Artificial Sequence
  Synthetic Oligonucleotide
cacuaaucaacagagggcc

SEQ ID NO: 1542 - RNA, 19 nt, Artificial Sequence
  Synthetic Oligonucleotide
gucuuaugaacagauggaa

SEQ ID NO: 1543 - RNA, 19 nt, Artificial Sequence
  Synthetic Oligonucleotide
cugccuguguguauggacc

SEQ ID NO: 1544 - RNA, 19 nt, Artificial Sequence
  Synthetic Oligonucleotide
ccugccuguguguauggac

SEQ ID NO: 1545 - RNA, 19 nt, Artificial Sequence
  Synthetic Oligonucleotide
agauggaaacugaugggga

SEQ ID NO: 1546 - RNA, 19 nt, Artificial Sequence
  Synthetic Oligonucleotide
cagauggaaacugaugggg

SEQ ID NO: 1547 - RNA, 19 nt, Artificial Sequence
  Synthetic Oligonucleotide
acagauggaaacugauggg

SEQ ID NO: 1548 - RNA, 19 nt, Artificial Sequence
  Synthetic Oligonucleotide
ggaauagacccuuucaaac

SEQ ID NO: 1549 - RNA, 19 nt, Artificial Sequence
  Synthetic Oligonucleotide
gaauagacccuuucaaacu

SEQ ID NO: 1550 - RNA, 19 nt, Artificial Sequence
  Synthetic Oligonucleotide
ucaguugcucacaaaucuu

SEQ ID NO: 1551 - RNA, 19 nt, Artificial Sequence
  Synthetic Oligonucleotide
guggaccucaaacaguauu

SEQ ID NO: 1552 - RNA, 19 nt, Artificial Sequence
  Synthetic Oligonucleotide
uggaccucaaacaguauug

SEQ ID NO: 1553 - RNA, 19 nt, Artificial Sequence
  Synthetic Oligonucleotide
ggaccucaaacaguauugu

SEQ ID NO: 1554 - RNA, 19 nt, Artificial Sequence
  Synthetic Oligonucleotide
gaccucaaacaguauuguu

SEQ ID NO: 1555 - RNA, 19 nt, Artificial Sequence
  Synthetic Oligonucleotide
accucaaacaguauuguug

SEQ ID NO: 1556 - RNA, 19 nt, Artificial Sequence
  Synthetic Oligonucleotide
caggcucauggccugaugg

SEQ ID NO: 1557 - RNA, 19 nt, Artificial Sequence
  Synthetic Oligonucleotide
acaggcucauggccugaug

SEQ ID NO: 1558 - RNA, 19 nt, Artificial Sequence
  Synthetic Oligonucleotide
ccucaaacaguauuguugu

SEQ ID NO: 1559 - RNA, 19 nt, Artificial Sequence
  Synthetic Oligonucleotide
caaacaguauuguuguguu

SEQ ID NO: 1560 - RNA, 19 nt, Artificial Sequence
  Synthetic Oligonucleotide
ucaaacaguauuguugugu

SEQ ID NO: 1561 - RNA, 19 nt, Artificial Sequence
  Synthetic Oligonucleotide
cucaaacaguauuguugug

SEQ ID NO: 1562 - RNA, 19 nt, Artificial Sequence
  Synthetic Oligonucleotide
ugguccagcucaaguuguc

SEQ ID NO: 1563 - RNA, 19 nt, Artificial Sequence
  Synthetic Oligonucleotide
gguccagcucaaguuguca

SEQ ID NO: 1564 - RNA, 19 nt, Artificial Sequence
  Synthetic Oligonucleotide
ucaaguugucacgauggaa

SEQ ID NO: 1565 - RNA, 19 nt, Artificial Sequence
  Synthetic Oligonucleotide
aguauuguuguguuuugug

SEQ ID NO: 1566 - RNA, 19 nt, Artificial Sequence
  Synthetic Oligonucleotide
caaguugucacgauggaaa

SEQ ID NO: 1567 - RNA, 19 nt, Artificial Sequence
  Synthetic Oligonucleotide
guauuguuguguuuugugg

SEQ ID NO: 1568 - RNA, 19 nt, Artificial Sequence
  Synthetic Oligonucleotide
acaguauuguuguguuuug

SEQ ID NO: 1569 - RNA, 19 nt, Artificial Sequence
  Synthetic Oligonucleotide
guugucacgauggaaaagc

SEQ ID NO: 1570 - RNA, 19 nt, Artificial Sequence
  Synthetic Oligonucleotide
caguauuguuguguuuugu

SEQ ID NO: 1571 - RNA, 19 nt, Artificial Sequence
  Synthetic Oligonucleotide
aacaguauuguuguguuuu

SEQ ID NO: 1572 - RNA, 19 nt, Artificial Sequence
  Synthetic Oligonucleotide
aaacaguauuguuguguuu

SEQ ID NO: 1573 - RNA, 19 nt, Artificial Sequence
  Synthetic Oligonucleotide
aguugucacgauggaaaag

SEQ ID NO: 1574 - RNA, 19 nt, Artificial Sequence
  Synthetic Oligonucleotide
aaguugucacgauggaaaa

SEQ ID NO: 1575 - RNA, 19 nt, Artificial Sequence
  Synthetic Oligonucleotide
gaaugcguuuguaucaaug

SEQ ID NO: 1576 - RNA, 19 nt, Artificial Sequence
  Synthetic Oligonucleotide
aaugcguuuguaucaaugg

SEQ ID NO: 1577 - RNA, 19 nt, Artificial Sequence
  Synthetic Oligonucleotide
gagacaacuggaaaggcuc

SEQ ID NO: 1578 - RNA, 19 nt, Artificial Sequence
  Synthetic Oligonucleotide
ccaguuaugugugcucagg

SEQ ID NO: 1579 - RNA, 19 nt, Artificial Sequence
  Synthetic Oligonucleotide
ugcagagacaacuggaaag

SEQ ID NO: 1580 - RNA, 19 nt, Artificial Sequence
  Synthetic Oligonucleotide
uccaguuaugugugcucag

SEQ ID NO: 1581 - RNA, 19 nt, Artificial Sequence
  Synthetic Oligonucleotide
agagacaacuggaaaggcu

SEQ ID NO: 1582 - RNA, 19 nt, Artificial Sequence
  Synthetic Oligonucleotide
gcagagacaacuggaaagg

SEQ ID NO: 1583 - RNA, 19 nt, Artificial Sequence
  Synthetic Oligonucleotide
guccagcucaaguugucac

SEQ ID NO: 1584 - RNA, 19 nt, Artificial Sequence
  Synthetic Oligonucleotide
ucugcagagacaacuggaa

SEQ ID NO: 1585 - RNA, 19 nt, Artificial Sequence
  Synthetic Oligonucleotide
uuccaguuaugugugcuca

SEQ ID NO: 1586 - RNA, 19 nt, Artificial Sequence
  Synthetic Oligonucleotide
ccagcucaaguugucacga

SEQ ID NO: 1587 - RNA, 19 nt, Artificial Sequence
  Synthetic Oligonucleotide
uccagcucaaguugucacg

SEQ ID NO: 1588 - RNA, 19 nt, Artificial Sequence
  Synthetic Oligonucleotide
gcucaaguugucacgaugg

SEQ ID NO: 1589 - RNA, 19 nt, Artificial Sequence
  Synthetic Oligonucleotide
cugcagagacaacuggaaa

SEQ ID NO: 1590 - RNA, 19 nt, Artificial Sequence
  Synthetic Oligonucleotide
caguaguaaugacugaugg

SEQ ID NO: 1591 - RNA, 19 nt, Artificial Sequence
  Synthetic Oligonucleotide
agcucaaguugucacgaug

SEQ ID NO: 1592 - RNA, 19 nt, Artificial Sequence
  Synthetic Oligonucleotide
cagagacaacuggaaaggc

SEQ ID NO: 1593 - RNA, 19 nt, Artificial Sequence
  Synthetic Oligonucleotide
auuggucaaagccgcaaug

SEQ ID NO: 1594 - RNA, 19 nt, Artificial Sequence
  Synthetic Oligonucleotide
aauuggucaaagccgcaau

SEQ ID NO: 1595 - RNA, 19 nt, Artificial Sequence
  Synthetic Oligonucleotide
cagcucaaguugucacgau

SEQ ID NO: 1596 - RNA, 19 nt, Artificial Sequence
  Synthetic Oligonucleotide
gucacgauggaaaagcaug

SEQ ID NO: 1597 - RNA, 19 nt, Artificial Sequence
  Synthetic Oligonucleotide
ucacgauggaaaagcaugg

SEQ ID NO: 1598 - RNA, 19 nt, Artificial Sequence
  Synthetic Oligonucleotide
ugucacgauggaaaagcau

SEQ ID NO: 1599 - RNA, 19 nt, Artificial Sequence
  Synthetic Oligonucleotide
cucaaguugucacgaugga

SEQ ID NO: 1600 - RNA, 19 nt, Artificial Sequence
  Synthetic Oligonucleotide
guggaguugauaaggggaa

SEQ ID NO: 1601 - RNA, 19 nt, Artificial Sequence
  Synthetic Oligonucleotide
gaaccuuaugugucaugcg

SEQ ID NO: 1602 - RNA, 19 nt, Artificial Sequence
  Synthetic Oligonucleotide
uagcaugguccagcucaag

SEQ ID NO: 1603 - RNA, 19 nt, Artificial Sequence
  Synthetic Oligonucleotide
uggaguugauaaggggaag

SEQ ID NO: 1604 - RNA, 19 nt, Artificial Sequence
  Synthetic Oligonucleotide
uugucacgauggaaaagca

SEQ ID NO: 1605 - RNA, 19 nt, Artificial Sequence
  Synthetic Oligonucleotide
aaccuuaugugucaugcga

SEQ ID NO: 1606 - RNA, 19 nt, Artificial Sequence
  Synthetic Oligonucleotide
auuguuguguuuuguggca

SEQ ID NO: 1607 - RNA, 19 nt, Artificial Sequence
  Synthetic Oligonucleotide
uuguuguguuuuguggcac

SEQ ID NO: 1608 - RNA, 19 nt, Artificial Sequence
  Synthetic Oligonucleotide
uauuguuguguuuuguggc

SEQ ID NO: 1609 - RNA, 19 nt, Artificial Sequence
  Synthetic Oligonucleotide
caugguccagcucaaguug

SEQ ID NO: 1610 - RNA, 19 nt, Artificial Sequence
  Synthetic Oligonucleotide
gcaugguccagcucaaguu

SEQ ID NO: 1611 - RNA, 19 nt, Artificial Sequence
  Synthetic Oligonucleotide
gagaaccuuaugugucaug

SEQ ID NO: 1612 - RNA, 19 nt, Artificial Sequence
  Synthetic Oligonucleotide
agcaugguccagcucaagu

SEQ ID NO: 1613 - RNA, 19 nt, Artificial Sequence
  Synthetic Oligonucleotide
uuuuauguggaguugauaa

SEQ ID NO: 1614 - RNA, 19 nt, Artificial Sequence
  Synthetic Oligonucleotide
agagaaccuuaugugucau

SEQ ID NO: 1615 - RNA, 19 nt, Artificial Sequence
  Synthetic Oligonucleotide
uuuauguggaguugauaag

SEQ ID NO: 1616 - RNA, 19 nt, Artificial Sequence
  Synthetic Oligonucleotide
uuggucaaagccgcaaugu

SEQ ID NO: 1617 - RNA, 19 nt, Artificial Sequence
  Synthetic Oligonucleotide
aacauaacagagauagugu

SEQ ID NO: 1618 - RNA, 19 nt, Artificial Sequence
  Synthetic Oligonucleotide
acauaacagagauagugua

SEQ ID NO: 1619 - RNA, 19 nt, Artificial Sequence
  Synthetic Oligonucleotide
auguggaguugauaagggg

SEQ ID NO: 1620 - RNA, 19 nt, Artificial Sequence
  Synthetic Oligonucleotide
uauguggaguugauaaggg

SEQ ID NO: 1621 - RNA, 19 nt, Artificial Sequence
  Synthetic Oligonucleotide
augguccagcucaaguugu

SEQ ID NO: 1622 - RNA, 19 nt, Artificial Sequence
  Synthetic Oligonucleotide
uguggaguugauaagggga

SEQ ID NO: 1623 - RNA, 19 nt, Artificial Sequence
  Synthetic Oligonucleotide
aauccaaaucaaaagauaa

SEQ ID NO: 1624 - RNA, 19 nt, Artificial Sequence
  Synthetic Oligonucleotide
auccaaaucaaaagauaau

SEQ ID NO: 1625 - RNA, 19 nt, Artificial Sequence
  Synthetic Oligonucleotide
ccaaaucaaaagauaauaa

SEQ ID NO: 1626 - RNA, 19 nt, Artificial Sequence
  Synthetic Oligonucleotide
uccaaaucaaaagauaaua

SEQ ID NO: 1627 - RNA, 19 nt, Artificial Sequence
  Synthetic Oligonucleotide
caaaucaaaagauaauaac

SEQ ID NO: 1628 - RNA, 19 nt, Artificial Sequence
  Synthetic Oligonucleotide
acaguaguaaugacugaug

SEQ ID NO: 1629 - RNA, 19 nt, Artificial Sequence
  Synthetic Oligonucleotide
ggugcuuuuauguggaguu

SEQ ID NO: 1630 - RNA, 19 nt, Artificial Sequence
  Synthetic Oligonucleotide
uguggaugggaagaacgau

SEQ ID NO: 1631 - RNA, 19 nt, Artificial Sequence
  Synthetic Oligonucleotide
gcuuuuauguggaguugau

SEQ ID NO: 1632 - RNA, 19 nt, Artificial Sequence
  Synthetic Oligonucleotide
ugcuuuuauguggaguuga

SEQ ID NO: 1633 - RNA, 19 nt, Artificial Sequence
  Synthetic Oligonucleotide
uuauguggaguugauaagg

SEQ ID NO: 1634 - RNA, 19 nt, Artificial Sequence
  Synthetic Oligonucleotide
agcauggcugcauguuugu

SEQ ID NO: 1635 - RNA, 19 nt, Artificial Sequence
  Synthetic Oligonucleotide
aagcauggcugcauguuug

SEQ ID NO: 1636 - RNA, 19 nt, Artificial Sequence
  Synthetic Oligonucleotide
aaagcauggcugcauguuu

SEQ ID NO: 1637 - RNA, 19 nt, Artificial Sequence
  Synthetic Oligonucleotide
cuuuuauguggaguugaua

SEQ ID NO: 1638 - RNA, 19 nt, Artificial Sequence
  Synthetic Oligonucleotide
gaaaagcauggcugcaugu

SEQ ID NO: 1639 - RNA, 19 nt, Artificial Sequence
  Synthetic Oligonucleotide
ggaaaagcauggcugcaug

SEQ ID NO: 1640 - RNA, 19 nt, Artificial Sequence
  Synthetic Oligonucleotide
guguggaugggaagaacga

SEQ ID NO: 1641 - RNA, 19 nt, Artificial Sequence
  Synthetic Oligonucleotide
aaugcaacugcuagcuuca

SEQ ID NO: 1642 - RNA, 19 nt, Artificial Sequence
  Synthetic Oligonucleotide
augcaacugcuagcuucau

SEQ ID NO: 1643 - RNA, 19 nt, Artificial Sequence
  Synthetic Oligonucleotide
gugcuuuuauguggaguug

SEQ ID NO: 1644 - RNA, 19 nt, Artificial Sequence
  Synthetic Oligonucleotide
gcaacugcuagcuucauuu

SEQ ID NO: 1645 - RNA, 19 nt, Artificial Sequence
  Synthetic Oligonucleotide
caacugcuagcuucauuua

SEQ ID NO: 1646 - RNA, 19 nt, Artificial Sequence
  Synthetic Oligonucleotide
uggaaaagcauggcugcau

SEQ ID NO: 1647 - RNA, 19 nt, Artificial Sequence
  Synthetic Oligonucleotide
agaaccuuaugugucaugc

SEQ ID NO: 1648 - RNA, 19 nt, Artificial Sequence
  Synthetic Oligonucleotide
auggaaaagcauggcugca

SEQ ID NO: 1649 - RNA, 19 nt, Artificial Sequence
  Synthetic Oligonucleotide
ggaacaggcucauggccug

SEQ ID NO: 1650 - RNA, 19 nt, Artificial Sequence
  Synthetic Oligonucleotide
gauggaaaagcauggcugc

SEQ ID NO: 1651 - RNA, 19 nt, Artificial Sequence
  Synthetic Oligonucleotide
aaaugcaacugcuagcuuc

SEQ ID NO: 1652 - RNA, 19 nt, Artificial Sequence
  Synthetic Oligonucleotide
gaacaggcucauggccuga

SEQ ID NO: 1653 - RNA, 19 nt, Artificial Sequence
  Synthetic Oligonucleotide
uauggaacaggcucauggc

SEQ ID NO: 1654 - RNA, 19 nt, Artificial Sequence
  Synthetic Oligonucleotide
ugcaacugcuagcuucauu

SEQ ID NO: 1655 - RNA, 19 nt, Artificial Sequence
  Synthetic Oligonucleotide
auggaacaggcucauggcc

SEQ ID NO: 1656 - RNA, 19 nt, Artificial Sequence
  Synthetic Oligonucleotide
aaaagcauggcugcauguu

SEQ ID NO: 1657 - RNA, 19 nt, Artificial Sequence
  Synthetic Oligonucleotide
uuacaggauuugcaccuuu

SEQ ID NO: 1658 - RNA, 19 nt, Artificial Sequence
  Synthetic Oligonucleotide
uggaacaggcucauggccu

SEQ ID NO: 1659 - RNA, 19 nt, Artificial Sequence
  Synthetic Oligonucleotide
aggcucauggccugauggg

SEQ ID NO: 1660 - RNA, 19 nt, Artificial Sequence
  Synthetic Oligonucleotide
aacaggcucauggccugau

SEQ ID NO: 1661 - RNA, 19 nt, Artificial Sequence
  Synthetic Oligonucleotide
auuacaggauuugcaccuu

SEQ ID NO: 1662 - RNA, 19 nt, Artificial Sequence
  Synthetic Oligonucleotide
guggaugggaagaacgauc

SEQ ID NO: 1663 - RNA, 19 nt, Artificial Sequence
  Synthetic Oligonucleotide
caggauuugcaccuuuuuc

SEQ ID NO: 1664 - RNA, 19 nt, Artificial Sequence
  Synthetic Oligonucleotide
accuuaugugucaugcgau

SEQ ID NO: 1665 - RNA, 19 nt, Artificial Sequence
  Synthetic Oligonucleotide
ggcucauggccugaugggg

SEQ ID NO: 1666 - RNA, 19 nt, Artificial Sequence
  Synthetic Oligonucleotide
cauaacagagauaguguau

SEQ ID NO: 1667 - RNA, 19 nt, Artificial Sequence
  Synthetic Oligonucleotide
ccuuaugugucaugcgauc

SEQ ID NO: 1668 - RNA, 19 nt, Artificial Sequence
  Synthetic Oligonucleotide
acaggauuugcaccuuuuu

SEQ ID NO: 1669 - RNA, 19 nt, Artificial Sequence
  Synthetic Oligonucleotide
acgauggaaaagcauggcu

SEQ ID NO: 1670 - RNA, 19 nt, Artificial Sequence
  Synthetic Oligonucleotide
cacgauggaaaagcauggc

SEQ ID NO: 1671 - RNA, 19 nt, Artificial Sequence
  Synthetic Oligonucleotide
cgauggaaaagcauggcug

SEQ ID NO: 1672 - RNA, 19 nt, Artificial Sequence
  Synthetic Oligonucleotide
auagcaugguccagcucaa

SEQ ID NO: 1673 - RNA, 19 nt, Artificial Sequence
  Synthetic Oligonucleotide
ggauuugcaccuuuuucua

SEQ ID NO: 1674 - RNA, 19 nt, Artificial Sequence
  Synthetic Oligonucleotide
uggaugggaagaacgauca

SEQ ID NO: 1675 - RNA, 19 nt, Artificial Sequence
  Synthetic Oligonucleotide
uugcaccuuuuucuaagga

SEQ ID NO: 1676 - RNA, 19 nt, Artificial Sequence
  Synthetic Oligonucleotide
gcucauggccugauggggc

SEQ ID NO: 1677 - RNA, 19 nt, Artificial Sequence
  Synthetic Oligonucleotide
uacaggauuugcaccuuuu

SEQ ID NO: 1678 - RNA, 19 nt, Artificial Sequence
  Synthetic Oligonucleotide
uuugcaccuuuuucuaagg

SEQ ID NO: 1679 - RNA, 19 nt, Artificial Sequence
  Synthetic Oligonucleotide
gauuugcaccuuuuucuaa

SEQ ID NO: 1680 - RNA, 19 nt, Artificial Sequence
  Synthetic Oligonucleotide
aaaaugcaacugcuagcuu

SEQ ID NO: 1681 - RNA, 19 nt, Artificial Sequence
  Synthetic Oligonucleotide
auuugcaccuuuuucuaag

SEQ ID NO: 1682 - RNA, 19 nt, Artificial Sequence
  Synthetic Oligonucleotide
cucauggccugauggggcg

SEQ ID NO: 1683 - RNA, 19 nt, Artificial Sequence
  Synthetic Oligonucleotide
acagaaauuggucaaagcc

SEQ ID NO: 1684 - RNA, 19 nt, Artificial Sequence
  Synthetic Oligonucleotide
uacagaaauuggucaaagc

SEQ ID NO: 1685 - RNA, 19 nt, Artificial Sequence
  Synthetic Oligonucleotide
uuaugugucaugcgauccu

SEQ ID NO: 1686 - RNA, 19 nt, Artificial Sequence
  Synthetic Oligonucleotide
cuuaugugucaugcgaucc

SEQ ID NO: 1687 - RNA, 19 nt, Artificial Sequence
  Synthetic Oligonucleotide
ggaugggaagaacgaucag

SEQ ID NO: 1688 - RNA, 19 nt, Artificial Sequence
  Synthetic Oligonucleotide
acguguggaugggaagaac

SEQ ID NO: 1689 - RNA, 19 nt, Artificial Sequence
  Synthetic Oligonucleotide
augacguguggaugggaag

SEQ ID NO: 1690 - RNA, 19 nt, Artificial Sequence
  Synthetic Oligonucleotide
auacagaaauuggucaaag

SEQ ID NO: 1691 - RNA, 19 nt, Artificial Sequence
  Synthetic Oligonucleotide
ugacguguggaugggaaga

SEQ ID NO: 1692 - RNA, 19 nt, Artificial Sequence
  Synthetic Oligonucleotide
gacguguggaugggaagaa

SEQ ID NO: 1693 - RNA, 19 nt, Artificial Sequence
  Synthetic Oligonucleotide
aauacagaaauuggucaaa

SEQ ID NO: 1694 - RNA, 19 nt, Artificial Sequence
  Synthetic Oligonucleotide
ucaccgugcccagugagcg

SEQ ID NO: 1695 - RNA, 19 nt, Artificial Sequence
  Synthetic Oligonucleotide
cucaccgugcccagugagc

SEQ ID NO: 1696 - RNA, 19 nt, Artificial Sequence
  Synthetic Oligonucleotide
caggcccccucaaagccga

SEQ ID NO: 1697 - RNA, 19 nt, Artificial Sequence
  Synthetic Oligonucleotide
ucaggcccccucaaagccg

SEQ ID NO: 1698 - RNA, 19 nt, Artificial Sequence
  Synthetic Oligonucleotide
uucacgcucaccgugccca

SEQ ID NO: 1699 - RNA, 19 nt, Artificial Sequence
  Synthetic Oligonucleotide
cacgcucaccgugcccagu

SEQ ID NO: 1700 - RNA, 19 nt, Artificial Sequence
  Synthetic Oligonucleotide
ucacgcucaccgugcccag

SEQ ID NO: 1701 - RNA, 19 nt, Artificial Sequence
  Synthetic Oligonucleotide
acgcucaccgugcccagug

SEQ ID NO: 1702 - RNA, 19 nt, Artificial Sequence
  Synthetic Oligonucleotide
cgcucaccgugcccaguga

SEQ ID NO: 1703 - RNA, 19 nt, Artificial Sequence
  Synthetic Oligonucleotide
gcucaccgugcccagugag

SEQ ID NO: 1704 - RNA, 19 nt, Artificial Sequence
  Synthetic Oligonucleotide
gacugcagcguagacgcuu

SEQ ID NO: 1705 - RNA, 19 nt, Artificial Sequence
  Synthetic Oligonucleotide
ggacugcagcguagacgcu

SEQ ID NO: 1706 - RNA, 19 nt, Artificial Sequence
  Synthetic Oligonucleotide
ugcagcguagacgcuuugu

SEQ ID NO: 1707 - RNA, 19 nt, Artificial Sequence
  Synthetic Oligonucleotide
acugcagcguagacgcuuu

SEQ ID NO: 1708 - RNA, 19 nt, Artificial Sequence
  Synthetic Oligonucleotide
cugcagcguagacgcuuug

SEQ ID NO: 1709 - RNA, 19 nt, Artificial Sequence
  Synthetic Oligonucleotide
uggccagcacuacagcuaa

SEQ ID NO: 1710 - RNA, 19 nt, Artificial Sequence
  Synthetic Oligonucleotide
agcguagacgcuuugucca

SEQ ID NO: 1711 - RNA, 19 nt, Artificial Sequence
  Synthetic Oligonucleotide
gcagcguagacgcuuuguc

SEQ ID NO: 1712 - RNA, 19 nt, Artificial Sequence
  Synthetic Oligonucleotide
cagcguagacgcuuugucc

SEQ ID NO: 1713 - RNA, 19 nt, Artificial Sequence
  Synthetic Oligonucleotide
gaucuugaggcucucaugg

SEQ ID NO: 1714 - RNA, 19 nt, Artificial Sequence
  Synthetic Oligonucleotide
aucuugaggcucucaugga

SEQ ID NO: 1715 - RNA, 19 nt, Artificial Sequence
  Synthetic Oligonucleotide
cugucaccucugacuaagg

SEQ ID NO: 1716 - RNA, 19 nt, Artificial Sequence
  Synthetic Oligonucleotide
ugucaccucugacuaaggg

SEQ ID NO: 1717 - RNA, 19 nt, Artificial Sequence
  Synthetic Oligonucleotide
guagacgcuuuguccaaaa

SEQ ID NO: 1718 - RNA, 19 nt, Artificial Sequence
  Synthetic Oligonucleotide
cguagacgcuuuguccaaa

SEQ ID NO: 1719 - RNA, 19 nt, Artificial Sequence
  Synthetic Oligonucleotide
agacgcuuuguccaaaaug

SEQ ID NO: 1720 - RNA, 19 nt, Artificial Sequence
  Synthetic Oligonucleotide
uagacgcuuuguccaaaau

SEQ ID NO: 1721 - RNA, 19 nt, Artificial Sequence
  Synthetic Oligonucleotide
gacgcuuuguccaaaaugc

SEQ ID NO: 1722 - RNA, 19 nt, Artificial Sequence
  Synthetic Oligonucleotide
auucugcuggugcacuugc

SEQ ID NO: 1723 - RNA, 19 nt, Artificial Sequence
  Synthetic Oligonucleotide
uauucugcuggugcacuug

SEQ ID NO: 1724 - RNA, 19 nt, Artificial Sequence
  Synthetic Oligonucleotide
ucaguuauucugcuggugc

SEQ ID NO: 1725 - RNA, 19 nt, Artificial Sequence
  Synthetic Oligonucleotide
guuauucugcuggugcacu

SEQ ID NO: 1726 - RNA, 19 nt, Artificial Sequence
  Synthetic Oligonucleotide
cucaguuauucugcuggug

SEQ ID NO: 1727 - RNA, 19 nt, Artificial Sequence
  Synthetic Oligonucleotide
aguuauucugcuggugcac

SEQ ID NO: 1728 - RNA, 19 nt, Artificial Sequence
  Synthetic Oligonucleotide
acgcuuuguccaaaaugcc

SEQ ID NO: 1729 - RNA, 19 nt, Artificial Sequence
  Synthetic Oligonucleotide
gcuuuguccaaaaugcccu

SEQ ID NO: 1730 - RNA, 19 nt, Artificial Sequence
  Synthetic Oligonucleotide
cgcuuuguccaaaaugccc

SEQ ID NO: 1731 - RNA, 19 nt, Artificial Sequence
  Synthetic Oligonucleotide
agucuaugagggaagaaua

SEQ ID NO: 1732 - RNA, 19 nt, Artificial Sequence
  Synthetic Oligonucleotide
uuauucugcuggugcacuu

SEQ ID NO: 1733 - RNA, 19 nt, Artificial Sequence
  Synthetic Oligonucleotide
caccucugacuaaggggau

SEQ ID NO: 1734 - RNA, 19 nt, Artificial Sequence
  Synthetic Oligonucleotide
gucaccucugacuaagggg

SEQ ID NO: 1735 - RNA, 19 nt, Artificial Sequence
  Synthetic Oligonucleotide
ucaccucugacuaagggga

SEQ ID NO: 1736 - RNA, 19 nt, Artificial Sequence
  Synthetic Oligonucleotide
gucuaugagggaagaauau

SEQ ID NO: 1737 - RNA, 19 nt, Artificial Sequence
  Synthetic Oligonucleotide
ucuaugagggaagaauauc

SEQ ID NO: 1738 - RNA, 19 nt, Artificial Sequence
  Synthetic Oligonucleotide
cagcuaaggcuauggagca

SEQ ID NO: 1739 - RNA, 19 nt, Artificial Sequence
  Synthetic Oligonucleotide
cuaugagggaagaauaucg

SEQ ID NO: 1740 - RNA, 19 nt, Artificial Sequence
  Synthetic Oligonucleotide
acagcuaaggcuauggagc

SEQ ID NO: 1741 - RNA, 19 nt, Artificial Sequence
  Synthetic Oligonucleotide
caguuauucugcuggugca

SEQ ID NO: 1742 - RNA, 19 nt, Artificial Sequence
  Synthetic Oligonucleotide
acuacagcuaaggcuaugg

SEQ ID NO: 1743 - RNA, 19 nt, Artificial Sequence
  Synthetic Oligonucleotide
cuacagcuaaggcuaugga

SEQ ID NO: 1744 - RNA, 19 nt, Artificial Sequence
  Synthetic Oligonucleotide
agcacuacagcuaaggcua

SEQ ID NO: 1745 - RNA, 19 nt, Artificial Sequence
  Synthetic Oligonucleotide
cacuacagcuaaggcuaug

SEQ ID NO: 1746 - RNA, 19 nt, Artificial Sequence
  Synthetic Oligonucleotide
gcacuacagcuaaggcuau

SEQ ID NO: 1747 - RNA, 19 nt, Artificial Sequence
  Synthetic Oligonucleotide
gcguagacgcuuuguccaa

SEQ ID NO: 1748 - RNA, 19 nt, Artificial Sequence
  Synthetic Oligonucleotide
ccagcacuacagcuaaggc

SEQ ID NO: 1749 - RNA, 19 nt, Artificial Sequence
  Synthetic Oligonucleotide
uacagcuaaggcuauggag

SEQ ID NO: 1750 - RNA, 19 nt, Artificial Sequence
  Synthetic Oligonucleotide
gccagcacuacagcuaagg

SEQ ID NO: 1751 - RNA, 19 nt, Artificial Sequence
  Synthetic Oligonucleotide
cagcacuacagcuaaggcu

SEQ ID NO: 1752 - RNA, 19 nt, Artificial Sequence
  Synthetic Oligonucleotide
uggcuaaagacaagaccaa

SEQ ID NO: 1753 - RNA, 19 nt, Artificial Sequence
  Synthetic Oligonucleotide
ggcuaaagacaagaccaau

SEQ ID NO: 1754 - RNA, 19 nt, Artificial Sequence
  Synthetic Oligonucleotide
gcuauggagcaaauggcug

SEQ ID NO: 1755 - RNA, 19 nt, Artificial Sequence
  Synthetic Oligonucleotide
cuauggagcaaauggcugg

SEQ ID NO: 1756 - RNA, 19 nt, Artificial Sequence
  Synthetic Oligonucleotide
cuggugcacuugccaguug

SEQ ID NO: 1757 - RNA, 19 nt, Artificial Sequence
  Synthetic Oligonucleotide
gagucuaugagggaagaau

SEQ ID NO: 1758 - RNA, 19 nt, Artificial Sequence
  Synthetic Oligonucleotide
ucugcuggugcacuugcca

SEQ ID NO: 1759 - RNA, 19 nt, Artificial Sequence
  Synthetic Oligonucleotide
gcuggugcacuugccaguu

SEQ ID NO: 1760 - RNA, 19 nt, Artificial Sequence
  Synthetic Oligonucleotide
cugcuggugcacuugccag

SEQ ID NO: 1761 - RNA, 19 nt, Artificial Sequence
  Synthetic Oligonucleotide
ugcuggugcacuugccagu

SEQ ID NO: 1762 - RNA, 19 nt, Artificial Sequence
  Synthetic Oligonucleotide
cuucuacggaaggaguacc

SEQ ID NO: 1763 - RNA, 19 nt, Artificial Sequence
  Synthetic Oligonucleotide
uaugagggaagaauaucga

SEQ ID NO: 1764 - RNA, 19 nt, Artificial Sequence
  Synthetic Oligonucleotide
ccuucuacggaaggaguac

SEQ ID NO: 1765 - RNA, 19 nt, Artificial Sequence
  Synthetic Oligonucleotide
uucugcuggugcacuugcc

SEQ ID NO: 1766 - RNA, 19 nt, Artificial Sequence
  Synthetic Oligonucleotide
uuccauggggccaaagaaa

SEQ ID NO: 1767 - RNA, 19 nt, Artificial Sequence
  Synthetic Oligonucleotide
auggggccaaagaaauagc

SEQ ID NO: 1768 - RNA, 19 nt, Artificial Sequence
  Synthetic Oligonucleotide
uccauggggccaaagaaau

SEQ ID NO: 1769 - RNA, 19 nt, Artificial Sequence
  Synthetic Oligonucleotide
cauggggccaaagaaauag

SEQ ID NO: 1770 - RNA, 19 nt, Artificial Sequence
  Synthetic Oligonucleotide
ggccagcacuacagcuaag

SEQ ID NO: 1771 - RNA, 19 nt, Artificial Sequence
  Synthetic Oligonucleotide
ucauuuugucagcauagag

SEQ ID NO: 1772 - RNA, 19 nt, Artificial Sequence
  Synthetic Oligonucleotide
ccauggggccaaagaaaua

SEQ ID NO: 1773 - RNA, 19 nt, Artificial Sequence
  Synthetic Oligonucleotide
cucauggaauggcuaaaga

SEQ ID NO: 1774 - RNA, 19 nt, Artificial Sequence
  Synthetic Oligonucleotide
ucauggaauggcuaaagac

SEQ ID NO: 1775 - RNA, 19 nt, Artificial Sequence
  Synthetic Oligonucleotide
auggaauggcuaaagacaa

SEQ ID NO: 1776 - RNA, 19 nt, Artificial Sequence
  Synthetic Oligonucleotide
cauggaauggcuaaagaca

SEQ ID NO: 1777 - RNA, 19 nt, Artificial Sequence
  Synthetic Oligonucleotide
ucucauggaauggcuaaag

SEQ ID NO: 1778 - RNA, 19 nt, Artificial Sequence
  Synthetic Oligonucleotide
uggaauggcuaaagacaag

SEQ ID NO: 1779 - RNA, 19 nt, Artificial Sequence
  Synthetic Oligonucleotide
gucauuuugucagcauaga

SEQ ID NO: 1780 - RNA, 19 nt, Artificial Sequence
  Synthetic Oligonucleotide
ggaauggcuaaagacaaga

SEQ ID NO: 1781 - RNA, 19 nt, Artificial Sequence
  Synthetic Oligonucleotide
gaauggcuaaagacaagac

SEQ ID NO: 1782 - RNA, 19 nt, Artificial Sequence
  Synthetic Oligonucleotide
aauggcuaaagacaagacc

SEQ ID NO: 1783 - RNA, 19 nt, Artificial Sequence
  Synthetic Oligonucleotide
gugcagaugcaacgauuca

SEQ ID NO: 1784 - RNA, 19 nt, Artificial Sequence
  Synthetic Oligonucleotide
gaggcucucauggaauggc

SEQ ID NO: 1785 - RNA, 19 nt, Artificial Sequence
  Synthetic Oligonucleotide
ugcagaugcaacgauucaa

SEQ ID NO: 1786 - RNA, 19 nt, Artificial Sequence
  Synthetic Oligonucleotide
aggcucucauggaauggcu

SEQ ID NO: 1787 - RNA, 19 nt, Artificial Sequence
  Synthetic Oligonucleotide
cagagacuugaagaugucu

SEQ ID NO: 1788 - RNA, 19 nt, Artificial Sequence
  Synthetic Oligonucleotide
agagacuugaagaugucuu

SEQ ID NO: 1789 - RNA, 19 nt, Artificial Sequence
  Synthetic Oligonucleotide
accucugacuaaggggauu

SEQ ID NO: 1790 - RNA, 19 nt, Artificial Sequence
  Synthetic Oligonucleotide
agacuugaagaugucuuug

SEQ ID NO: 1791 - RNA, 19 nt, Artificial Sequence
  Synthetic Oligonucleotide
gacuugaagaugucuuugc

SEQ ID NO: 1792 - RNA, 19 nt, Artificial Sequence
  Synthetic Oligonucleotide
gagacuugaagaugucuuu

SEQ ID NO: 1793 - RNA, 19 nt, Artificial Sequence
  Synthetic Oligonucleotide
uugaggcucucauggaaug

SEQ ID NO: 1794 - RNA, 19 nt, Artificial Sequence
  Synthetic Oligonucleotide
cuugaggcucucauggaau

SEQ ID NO: 1795 - RNA, 19 nt, Artificial Sequence
  Synthetic Oligonucleotide
ugaggcucucauggaaugg

SEQ ID NO: 1796 - RNA, 19 nt, Artificial Sequence
  Synthetic Oligonucleotide
cucugacuaaggggauuuu

SEQ ID NO: 1797 - RNA, 19 nt, Artificial Sequence
  Synthetic Oligonucleotide
cagcagaaugcuguggaug

SEQ ID NO: 1798 - RNA, 19 nt, Artificial Sequence
  Synthetic Oligonucleotide
ccucugacuaaggggauuu

SEQ ID NO: 1799 - RNA, 19 nt, Artificial Sequence
  Synthetic Oligonucleotide
gcucucauggaauggcuaa

SEQ ID NO: 1800 - RNA, 19 nt, Artificial Sequence
  Synthetic Oligonucleotide
cucucauggaauggcuaaa

SEQ ID NO: 1801 - RNA, 19 nt, Artificial Sequence
  Synthetic Oligonucleotide
aacagcagaaugcugugga

SEQ ID NO: 1802 - RNA, 19 nt, Artificial Sequence
  Synthetic Oligonucleotide
gaacagcagaaugcugugg

SEQ ID NO: 1803 - RNA, 19 nt, Artificial Sequence
  Synthetic Oligonucleotide
ggcucucauggaauggcua

SEQ ID NO: 1804 - RNA, 19 nt, Artificial Sequence
  Synthetic Oligonucleotide
aggaacagcagaaugcugu

SEQ ID NO: 1805 - RNA, 19 nt, Artificial Sequence
  Synthetic Oligonucleotide
ucuugaggcucucauggaa

SEQ ID NO: 1806 - RNA, 19 nt, Artificial Sequence
  Synthetic Oligonucleotide
ggaacagcagaaugcugug

SEQ ID NO: 1807 - RNA, 19 nt, Artificial Sequence
  Synthetic Oligonucleotide
ucuucuugaaaauuugcag

SEQ ID NO: 1808 - RNA, 19 nt, Artificial Sequence
  Synthetic Oligonucleotide
aucuucuugaaaauuugca

SEQ ID NO: 1809 - RNA, 19 nt, Artificial Sequence
  Synthetic Oligonucleotide
acagcagaaugcuguggau

SEQ ID NO: 1810 - RNA, 19 nt, Artificial Sequence
  Synthetic Oligonucleotide
augggggugcagaugcaac

SEQ ID NO: 1811 - RNA, 19 nt, Artificial Sequence
  Synthetic Oligonucleotide
ugggggugcagaugcaacg

SEQ ID NO: 1812 - RNA, 19 nt, Artificial Sequence
  Synthetic Oligonucleotide
ccuaucagaaacgaauggg

SEQ ID NO: 1813 - RNA, 19 nt, Artificial Sequence
  Synthetic Oligonucleotide
uggagcaaauggcuggauc

SEQ ID NO: 1814 - RNA, 19 nt, Artificial Sequence
  Synthetic Oligonucleotide
guguucacgcucaccgugc

SEQ ID NO: 1815 - RNA, 19 nt, Artificial Sequence
  Synthetic Oligonucleotide
ggggugcagaugcaacgau

SEQ ID NO: 1816 - RNA, 19 nt, Artificial Sequence
  Synthetic Oligonucleotide
ggugcagaugcaacgauuc

SEQ ID NO: 1817 - RNA, 19 nt, Artificial Sequence
  Synthetic Oligonucleotide
ggauucuugaucgucuuuu

SEQ ID NO: 1818 - RNA, 19 nt, Artificial Sequence
  Synthetic Oligonucleotide
auggagcaaauggcuggau

SEQ ID NO: 1819 - RNA, 19 nt, Artificial Sequence
  Synthetic Oligonucleotide
gggugcagaugcaacgauu

SEQ ID NO: 1820 - RNA, 19 nt, Artificial Sequence
  Synthetic Oligonucleotide
uggauucuugaucgucuuu

SEQ ID NO: 1821 - RNA, 19 nt, Artificial Sequence
  Synthetic Oligonucleotide
uguucacgcucaccgugcc

SEQ ID NO: 1822 - RNA, 19 nt, Artificial Sequence
  Synthetic Oligonucleotide
gggggugcagaugcaacga

SEQ ID NO: 1823 - RNA, 19 nt, Artificial Sequence
  Synthetic Oligonucleotide
guucacgcucaccgugccc

SEQ ID NO: 1824 - RNA, 19 nt, Artificial Sequence
  Synthetic Oligonucleotide
uugaagaugucuuugcugg

SEQ ID NO: 1825 - RNA, 19 nt, Artificial Sequence
  Synthetic Oligonucleotide
cuugaagaugucuuugcug

SEQ ID NO: 1826 - RNA, 19 nt, Artificial Sequence
  Synthetic Oligonucleotide
uauggagcaaauggcugga

SEQ ID NO: 1827 - RNA, 19 nt, Artificial Sequence
  Synthetic Oligonucleotide
uguguucacgcucaccgug

SEQ ID NO: 1828 - RNA, 19 nt, Artificial Sequence
  Synthetic Oligonucleotide
uuguguucacgcucaccgu

SEQ ID NO: 1829 - RNA, 19 nt, Artificial Sequence
  Synthetic Oligonucleotide
guggauucuugaucgucuu

SEQ ID NO: 1830 - RNA, 19 nt, Artificial Sequence
  Synthetic Oligonucleotide
uuuguguucacgcucaccg

SEQ ID NO: 1831 - RNA, 19 nt, Artificial Sequence
  Synthetic Oligonucleotide
acuugaagaugucuuugcu

SEQ ID NO: 1832 - RNA, 19 nt, Artificial Sequence
  Synthetic Oligonucleotide
uguggauucuugaucgucu

SEQ ID NO: 1833 - RNA, 19 nt, Artificial Sequence
  Synthetic Oligonucleotide
gaaugggggugcagaugca

SEQ ID NO: 1834 - RNA, 19 nt, Artificial Sequence
  Synthetic Oligonucleotide
uugcuagucaggccaggca

SEQ ID NO: 1835 - RNA, 19 nt, Artificial Sequence
  Synthetic Oligonucleotide
cgaaugggggugcagaugc

SEQ ID NO: 1836 - RNA, 19 nt, Artificial Sequence
  Synthetic Oligonucleotide
aaugggggugcagaugcaa

SEQ ID NO: 1837 - RNA, 19 nt, Artificial Sequence
  Synthetic Oligonucleotide
cagaaacgaaugggggugc

SEQ ID NO: 1838 - RNA, 19 nt, Artificial Sequence
  Synthetic Oligonucleotide
agaaacgaaugggggugca

SEQ ID NO: 1839 - RNA, 19 nt, Artificial Sequence
  Synthetic Oligonucleotide
aaacgaaugggggugcaga

SEQ ID NO: 1840 - RNA, 19 nt, Artificial Sequence
  Synthetic Oligonucleotide
aacgaaugggggugcagau

SEQ ID NO: 1841 - RNA, 19 nt, Artificial Sequence
  Synthetic Oligonucleotide
acgaaugggggugcagaug

SEQ ID NO: 1842 - RNA, 19 nt, Artificial Sequence
  Synthetic Oligonucleotide
gaaacgaaugggggugcag

SEQ ID NO: 1843 - RNA, 19 nt, Artificial Sequence
  Synthetic Oligonucleotide
aaggcuauggagcaaaugg

SEQ ID NO: 1844 - RNA, 19 nt, Artificial Sequence
  Synthetic Oligonucleotide
aggcuauggagcaaauggc

SEQ ID NO: 1845 - RNA, 19 nt, Artificial Sequence
  Synthetic Oligonucleotide
auugggaucuugcacuuga

SEQ ID NO: 1846 - RNA, 19 nt, Artificial Sequence
  Synthetic Oligonucleotide
cuaaggcuauggagcaaau

SEQ ID NO: 1847 - RNA, 19 nt, Artificial Sequence
  Synthetic Oligonucleotide
gcuaaggcuauggagcaaa

SEQ ID NO: 1848 - RNA, 19 nt, Artificial Sequence
  Synthetic Oligonucleotide
uaaggcuauggagcaaaug

SEQ ID NO: 1849 - RNA, 19 nt, Artificial Sequence
  Synthetic Oligonucleotide
ucauugggaucuugcacuu

SEQ ID NO: 1850 - RNA, 19 nt, Artificial Sequence
  Synthetic Oligonucleotide
ugggaucuugcacuugaua

SEQ ID NO: 1851 - RNA, 19 nt, Artificial Sequence
  Synthetic Oligonucleotide
uugggaucuugcacuugau

SEQ ID NO: 1852 - RNA, 19 nt, Artificial Sequence
  Synthetic Oligonucleotide
cauugggaucuugcacuug

SEQ ID NO: 1853 - RNA, 19 nt, Artificial Sequence
  Synthetic Oligonucleotide
cugagucuaugagggaaga

SEQ ID NO: 1854 - RNA, 19 nt, Artificial Sequence
  Synthetic Oligonucleotide
ggcuauggagcaaauggcu

SEQ ID NO: 1855 - RNA, 19 nt, Artificial Sequence
  Synthetic Oligonucleotide
ccugagucuaugagggaag

SEQ ID NO: 1856 - RNA, 19 nt, Artificial Sequence
  Synthetic Oligonucleotide
aucauugggaucuugcacu

SEQ ID NO: 1857 - RNA, 19 nt, Artificial Sequence
  Synthetic Oligonucleotide
agcagaaugcuguggaugc

SEQ ID NO: 1858 - RNA, 19 nt, Artificial Sequence
  Synthetic Oligonucleotide
gcagaaugcuguggaugcu

SEQ ID NO: 1859 - RNA, 19 nt, Artificial Sequence
  Synthetic Oligonucleotide
uugggacucauccuagcuc

SEQ ID NO: 1860 - RNA, 19 nt, Artificial Sequence
  Synthetic Oligonucleotide
agaaugcuguggaugcuga

SEQ ID NO: 1861 - RNA, 19 nt, Artificial Sequence
  Synthetic Oligonucleotide
cagaaugcuguggaugcug

SEQ ID NO: 1862 - RNA, 19 nt, Artificial Sequence
  Synthetic Oligonucleotide
uaucauugggaucuugcac

SEQ ID NO: 1863 - RNA, 19 nt, Artificial Sequence
  Synthetic Oligonucleotide
augaucuucuugaaaauuu

SEQ ID NO: 1864 - RNA, 19 nt, Artificial Sequence
  Synthetic Oligonucleotide
agcuaaggcuauggagcaa

SEQ ID NO: 1865 - RNA, 19 nt, Artificial Sequence
  Synthetic Oligonucleotide
auccugucaccucugacua

SEQ ID NO: 1866 - RNA, 19 nt, Artificial Sequence
  Synthetic Oligonucleotide
uccugucaccucugacuaa

SEQ ID NO: 1867 - RNA, 19 nt, Artificial Sequence
  Synthetic Oligonucleotide
gaucuucuugaaaauuugc

SEQ ID NO: 1868 - RNA, 19 nt, Artificial Sequence
  Synthetic Oligonucleotide
cuaucagaaacgaaugggg

SEQ ID NO: 1869 - RNA, 19 nt, Artificial Sequence
  Synthetic Oligonucleotide
ucagaaacgaaugggggug

SEQ ID NO: 1870 - RNA, 19 nt, Artificial Sequence
  Synthetic Oligonucleotide
uaucagaaacgaauggggg

SEQ ID NO: 1871 - RNA, 19 nt, Artificial Sequence
  Synthetic Oligonucleotide
aucagaaacgaaugggggu

SEQ ID NO: 1872 - RNA, 19 nt, Artificial Sequence
  Synthetic Oligonucleotide
gaaugcuguggaugcugac

SEQ ID NO: 1873 - RNA, 19 nt, Artificial Sequence
  Synthetic Oligonucleotide
ugaucuucuugaaaauuug

SEQ ID NO: 1874 - RNA, 19 nt, Artificial Sequence
  Synthetic Oligonucleotide
uaccugagucuaugaggga

SEQ ID NO: 1875 - RNA, 19 nt, Artificial Sequence
  Synthetic Oligonucleotide
aaugcuguggaugcugacg

SEQ ID NO: 1876 - RNA, 19 nt, Artificial Sequence
  Synthetic Oligonucleotide
accugagucuaugagggaa

SEQ ID NO: 1877 - RNA, 19 nt, Artificial Sequence
  Synthetic Oligonucleotide
guaccugagucuaugaggg

SEQ ID NO: 1878 - RNA, 19 nt, Artificial Sequence
  Synthetic Oligonucleotide
augcuguggaugcugacga

SEQ ID NO: 1879 - RNA, 19 nt, Artificial Sequence
  Synthetic Oligonucleotide
auggcuaaagacaagacca

SEQ ID NO: 1880 - RNA, 19 nt, Artificial Sequence
  Synthetic Oligonucleotide
cccagugagcgaggacugc

SEQ ID NO: 1881 - RNA, 19 nt, Artificial Sequence
  Synthetic Oligonucleotide
ccagugagcgaggacugca

SEQ ID NO: 1882 - RNA, 19 nt, Artificial Sequence
  Synthetic Oligonucleotide
gugcccagugagcgaggac

SEQ ID NO: 1883 - RNA, 19 nt, Artificial Sequence
  Synthetic Oligonucleotide
ugcccagugagcgaggacu

SEQ ID NO: 1884 - RNA, 19 nt, Artificial Sequence
  Synthetic Oligonucleotide
gcccagugagcgaggacug

SEQ ID NO: 1885 - RNA, 19 nt, Artificial Sequence
  Synthetic Oligonucleotide
caccgugcccagugagcga

SEQ ID NO: 1886 - RNA, 19 nt, Artificial Sequence
  Synthetic Oligonucleotide
accgugcccagugagcgag

SEQ ID NO: 1887 - RNA, 19 nt, Artificial Sequence
  Synthetic Oligonucleotide
ccgugcccagugagcgagg

SEQ ID NO: 1888 - RNA, 19 nt, Artificial Sequence
  Synthetic Oligonucleotide
cgugcccagugagcgagga

SEQ ID NO: 1889 - RNA, 19 nt, Artificial Sequence
  Synthetic Oligonucleotide
cacuugccaguugcauggg

SEQ ID NO: 1890 - RNA, 19 nt, Artificial Sequence
  Synthetic Oligonucleotide
agauugcugacucccagca

SEQ ID NO: 1891 - RNA, 19 nt, Artificial Sequence
  Synthetic Oligonucleotide
cagauugcugacucccagc

SEQ ID NO: 1892 - RNA, 19 nt, Artificial Sequence
  Synthetic Oligonucleotide
gcacuugccaguugcaugg

SEQ ID NO: 1893 - RNA, 19 nt, Artificial Sequence
  Synthetic Oligonucleotide
ggugcacuugccaguugca

SEQ ID NO: 1894 - RNA, 19 nt, Artificial Sequence
  Synthetic Oligonucleotide
gugcacuugccaguugcau

SEQ ID NO: 1895 - RNA, 19 nt, Artificial Sequence
  Synthetic Oligonucleotide
ugcacuugccaguugcaug

SEQ ID NO: 1896 - RNA, 19 nt, Artificial Sequence
  Synthetic Oligonucleotide
gauccaaauaacauggaca

SEQ ID NO: 1897 - RNA, 19 nt, Artificial Sequence
  Synthetic Oligonucleotide
cgaggacugcagcguagac

SEQ ID NO: 1898 - RNA, 19 nt, Artificial Sequence
  Synthetic Oligonucleotide
gaggacugcagcguagacg

SEQ ID NO: 1899 - RNA, 19 nt, Artificial Sequence
  Synthetic Oligonucleotide
gagcgaggacugcagcgua

SEQ ID NO: 1900 - RNA, 19 nt, Artificial Sequence
  Synthetic Oligonucleotide
ugcacuugauauuguggau

SEQ ID NO: 1901 - RNA, 19 nt, Artificial Sequence
  Synthetic Oligonucleotide
ugagcgaggacugcagcgu

SEQ ID NO: 1902 - RNA, 19 nt, Artificial Sequence
  Synthetic Oligonucleotide
gcacuugauauuguggauu

SEQ ID NO: 1903 - RNA, 19 nt, Artificial Sequence
  Synthetic Oligonucleotide
gcgaggacugcagcguaga

SEQ ID NO: 1904 - RNA, 19 nt, Artificial Sequence
  Synthetic Oligonucleotide
agugagcgaggacugcagc

SEQ ID NO: 1905 - RNA, 19 nt, Artificial Sequence
  Synthetic Oligonucleotide
gugagcgaggacugcagcg

SEQ ID NO: 1906 - RNA, 19 nt, Artificial Sequence
  Synthetic Oligonucleotide
agcgaggacugcagcguag

SEQ ID NO: 1907 - RNA, 19 nt, Artificial Sequence
  Synthetic Oligonucleotide
cagugagcgaggacugcag

SEQ ID NO: 1908 - RNA, 19 nt, Artificial Sequence
  Synthetic Oligonucleotide
uugcacuugauauugugga

SEQ ID NO: 1909 - RNA, 19 nt, Artificial Sequence
  Synthetic Oligonucleotide
auauuguggauucuugauc

SEQ ID NO: 1910 - RNA, 19 nt, Artificial Sequence
  Synthetic Oligonucleotide
ugauauuguggauucuuga

SEQ ID NO: 1911 - RNA, 19 nt, Artificial Sequence
  Synthetic Oligonucleotide
uauuguggauucuugaucg

SEQ ID NO: 1912 - RNA, 19 nt, Artificial Sequence
  Synthetic Oligonucleotide
gauauuguggauucuugau

SEQ ID NO: 1913 - RNA, 19 nt, Artificial Sequence
  Synthetic Oligonucleotide
aaaagagggccuucuacgg

SEQ ID NO: 1914 - RNA, 19 nt, Artificial Sequence
  Synthetic Oligonucleotide
cuugauauuguggauucuu

SEQ ID NO: 1915 - RNA, 19 nt, Artificial Sequence
  Synthetic Oligonucleotide
cacuugauauuguggauuc

SEQ ID NO: 1916 - RNA, 19 nt, Artificial Sequence
  Synthetic Oligonucleotide
acuugauauuguggauucu

SEQ ID NO: 1917 - RNA, 19 nt, Artificial Sequence
  Synthetic Oligonucleotide
uugauauuguggauucuug

SEQ ID NO: 1918 - RNA, 19 nt, Artificial Sequence
  Synthetic Oligonucleotide
aggacugcagcguagacgc

SEQ ID NO: 1919 - RNA, 19 nt, Artificial Sequence
  Synthetic Oligonucleotide
aucgucuuuuuuucaaaug

SEQ ID NO: 1920 - RNA, 19 nt, Artificial Sequence
  Synthetic Oligonucleotide
uugaucgucuuuuuuucaa

SEQ ID NO: 1921 - RNA, 19 nt, Artificial Sequence
  Synthetic Oligonucleotide
gaucgucuuuuuuucaaau

SEQ ID NO: 1922 - RNA, 19 nt, Artificial Sequence
  Synthetic Oligonucleotide
ugaucgucuuuuuuucaaa

SEQ ID NO: 1923 - RNA, 19 nt, Artificial Sequence
  Synthetic Oligonucleotide
ucgucuuuuuuucaaaugc

SEQ ID NO: 1924 - RNA, 19 nt, Artificial Sequence
  Synthetic Oligonucleotide
gauucuugaucgucuuuuu

SEQ ID NO: 1925 - RNA, 19 nt, Artificial Sequence
  Synthetic Oligonucleotide
auucuugaucgucuuuuuu

SEQ ID NO: 1926 - RNA, 19 nt, Artificial Sequence
  Synthetic Oligonucleotide
ugugaacagauugcugacu

SEQ ID NO: 1927 - RNA, 19 nt, Artificial Sequence
  Synthetic Oligonucleotide
gugaacagauugcugacuc

SEQ ID NO: 1928 - RNA, 19 nt, Artificial Sequence
  Synthetic Oligonucleotide
aacagauugcugacuccca

SEQ ID NO: 1929 - RNA, 19 nt, Artificial Sequence
  Synthetic Oligonucleotide
cuugaucgucuuuuuuuca

SEQ ID NO: 1930 - RNA, 19 nt, Artificial Sequence
  Synthetic Oligonucleotide
gaacagauugcugacuccc

SEQ ID NO: 1931 - RNA, 19 nt, Artificial Sequence
  Synthetic Oligonucleotide
ugaacagauugcugacucc

SEQ ID NO: 1932 - RNA, 19 nt, Artificial Sequence
  Synthetic Oligonucleotide
uucuugaucgucuuuuuuu

SEQ ID NO: 1933 - RNA, 19 nt, Artificial Sequence
  Synthetic Oligonucleotide
ucuugaucgucuuuuuuuc

SEQ ID NO: 1934 - RNA, 19 nt, Artificial Sequence
  Synthetic Oligonucleotide
acaugagaacagaaugguu

SEQ ID NO: 1935 - RNA, 19 nt, Artificial Sequence
  Synthetic Oligonucleotide
uuguggauucuugaucguc

SEQ ID NO: 1936 - RNA, 19 nt, Artificial Sequence
  Synthetic Oligonucleotide
uaucgaaaggaacagcaga

SEQ ID NO: 1937 - RNA, 19 nt, Artificial Sequence
  Synthetic Oligonucleotide
auuguggauucuugaucgu

SEQ ID NO: 1938 - RNA, 19 nt, Artificial Sequence
  Synthetic Oligonucleotide
acagauugcugacucccag

SEQ ID NO: 1939 - RNA, 19 nt, Artificial Sequence
  Synthetic Oligonucleotide
acaaccaauccauuaauaa

SEQ ID NO: 1940 - RNA, 19 nt, Artificial Sequence
  Synthetic Oligonucleotide
cuaaccgaggucgaaacgu

SEQ ID NO: 1941 - RNA, 19 nt, Artificial Sequence
  Synthetic Oligonucleotide
uaaccgaggucgaaacgua

SEQ ID NO: 1942 - RNA, 19 nt, Artificial Sequence
  Synthetic Oligonucleotide
aacaaccaauccauuaaua

SEQ ID NO: 1943 - RNA, 19 nt, Artificial Sequence
  Synthetic Oligonucleotide
ucuaaccgaggucgaaacg

SEQ ID NO: 1944 - RNA, 19 nt, Artificial Sequence
  Synthetic Oligonucleotide
uucuaaccgaggucgaaac

SEQ ID NO: 1945 - RNA, 19 nt, Artificial Sequence
  Synthetic Oligonucleotide
caacaaccaauccauuaau

SEQ ID NO: 1946 - RNA, 19 nt, Artificial Sequence
  Synthetic Oligonucleotide
gaugaucuucuugaaaauu

SEQ ID NO: 1947 - RNA, 19 nt, Artificial Sequence
  Synthetic Oligonucleotide
ggccuucuacggaaggagu

SEQ ID NO: 1948 - RNA, 19 nt, Artificial Sequence
  Synthetic Oligonucleotide
cuucuaaccgaggucgaaa

SEQ ID NO: 1949 - RNA, 19 nt, Artificial Sequence
  Synthetic Oligonucleotide
gggccuucuacggaaggag

SEQ ID NO: 1950 - RNA, 19 nt, Artificial Sequence
  Synthetic Oligonucleotide
agaugaucuucuugaaaau

SEQ ID NO: 1951 - RNA, 19 nt, Artificial Sequence
  Synthetic Oligonucleotide
gagggccuucuacggaagg

SEQ ID NO: 1952 - RNA, 19 nt, Artificial Sequence
  Synthetic Oligonucleotide
gaauaucgaaaggaacagc

SEQ ID NO: 1953 - RNA, 19 nt, Artificial Sequence
  Synthetic Oligonucleotide
aauaucgaaaggaacagca

SEQ ID NO: 1954 - RNA, 19 nt, Artificial Sequence
  Synthetic Oligonucleotide
cagaucuugaggcucucau

SEQ ID NO: 1955 - RNA, 19 nt, Artificial Sequence
  Synthetic Oligonucleotide
augagggaagaauaucgaa

SEQ ID NO: 1956 - RNA, 19 nt, Artificial Sequence
  Synthetic Oligonucleotide
cacagaucuugaggcucuc

SEQ ID NO: 1957 - RNA, 19 nt, Artificial Sequence
  Synthetic Oligonucleotide
acagaucuugaggcucuca

SEQ ID NO: 1958 - RNA, 19 nt, Artificial Sequence
  Synthetic Oligonucleotide
agaucuugaggcucucaug

SEQ ID NO: 1959 - RNA, 19 nt, Artificial Sequence
  Synthetic Oligonucleotide
ugagggaagaauaucgaaa

SEQ ID NO: 1960 - RNA, 19 nt, Artificial Sequence
  Synthetic Oligonucleotide
agggccuucuacggaagga

SEQ ID NO: 1961 - RNA, 19 nt, Artificial Sequence
  Synthetic Oligonucleotide
acacagaucuugaggcucu

SEQ ID NO: 1962 - RNA, 19 nt, Artificial Sequence
  Synthetic Oligonucleotide
aacacagaucuugaggcuc

SEQ ID NO: 1963 - RNA, 19 nt, Artificial Sequence
  Synthetic Oligonucleotide
agggaagaauaucgaaagg

SEQ ID NO: 1964 - RNA, 19 nt, Artificial Sequence
  Synthetic Oligonucleotide
auaucgaaaggaacagcag

SEQ ID NO: 1965 - RNA, 19 nt, Artificial Sequence
  Synthetic Oligonucleotide
gggaagaauaucgaaagga

SEQ ID NO: 1966 - RNA, 19 nt, Artificial Sequence
  Synthetic Oligonucleotide
gagggaagaauaucgaaag

SEQ ID NO: 1967 - RNA, 19 nt, Artificial Sequence
  Synthetic Oligonucleotide
aaagagggccuucuacgga

SEQ ID NO: 1968 - RNA, 19 nt, Artificial Sequence
  Synthetic Oligonucleotide
agagggccuucuacggaag

SEQ ID NO: 1969 - RNA, 19 nt, Artificial Sequence
  Synthetic Oligonucleotide
aagaauaucgaaaggaaca

SEQ ID NO: 1970 - RNA, 19 nt, Artificial Sequence
  Synthetic Oligonucleotide
gaagaauaucgaaaggaac

SEQ ID NO: 1971 - RNA, 19 nt, Artificial Sequence
  Synthetic Oligonucleotide
ggaagaauaucgaaaggaa

SEQ ID NO: 1972 - RNA, 19 nt, Artificial Sequence
  Synthetic Oligonucleotide
aagagggccuucuacggaa

SEQ ID NO: 1973 - RNA, 19 nt, Artificial Sequence
  Synthetic Oligonucleotide
agaauaucgaaaggaacag

SEQ ID NO: 1974 - RNA, 19 nt, Artificial Sequence
  Synthetic Oligonucleotide
cuugcacuugauauugugg

SEQ ID NO: 1975 - RNA, 19 nt, Artificial Sequence
  Synthetic Oligonucleotide
aucuugcacuugauauugu

SEQ ID NO: 1976 - RNA, 19 nt, Artificial Sequence
  Synthetic Oligonucleotide
ucuugcacuugauauugug

SEQ ID NO: 1977 - RNA, 19 nt, Artificial Sequence
  Synthetic Oligonucleotide
aguaucauugggaucuugc

SEQ ID NO: 1978 - RNA, 19 nt, Artificial Sequence
  Synthetic Oligonucleotide
guaucauugggaucuugca

SEQ ID NO: 1979 - RNA, 19 nt, Artificial Sequence
  Synthetic Oligonucleotide
cagaugcaacgauucaagu

SEQ ID NO: 1980 - RNA, 19 nt, Artificial Sequence
  Synthetic Oligonucleotide
uuuguccaaaaugcccuca

SEQ ID NO: 1981 - RNA, 19 nt, Artificial Sequence
  Synthetic Oligonucleotide
uuguccaaaaugcccucaa

SEQ ID NO: 1982 - RNA, 19 nt, Artificial Sequence
  Synthetic Oligonucleotide
ggaauggggauccaaauaa

SEQ ID NO: 1983 - RNA, 19 nt, Artificial Sequence
  Synthetic Oligonucleotide
gggaauggggauccaaaua

SEQ ID NO: 1984 - RNA, 19 nt, Artificial Sequence
  Synthetic Oligonucleotide
gcagaugcaacgauucaag

SEQ ID NO: 1985 - RNA, 19 nt, Artificial Sequence
  Synthetic Oligonucleotide
aaauggugcaggcaaugag

SEQ ID NO: 1986 - RNA, 19 nt, Artificial Sequence
  Synthetic Oligonucleotide
caaauggugcaggcaauga

SEQ ID NO: 1987 - RNA, 19 nt, Artificial Sequence
  Synthetic Oligonucleotide
augcccucaaugggaaugg

SEQ ID NO: 1988 - RNA, 19 nt, Artificial Sequence
  Synthetic Oligonucleotide
ugcaugggccucauauaca

SEQ ID NO: 1989 - RNA, 19 nt, Artificial Sequence
  Synthetic Oligonucleotide
guccaaaaugcccucaaug

SEQ ID NO: 1990 - RNA, 19 nt, Artificial Sequence
  Synthetic Oligonucleotide
uccaaaaugcccucaaugg

SEQ ID NO: 1991 - RNA, 19 nt, Artificial Sequence
  Synthetic Oligonucleotide
aaugcccucaaugggaaug

SEQ ID NO: 1992 - RNA, 19 nt, Artificial Sequence
  Synthetic Oligonucleotide
gcaugggccucauauacaa

SEQ ID NO: 1993 - RNA, 19 nt, Artificial Sequence
  Synthetic Oligonucleotide
uguccaaaaugcccucaau

SEQ ID NO: 1994 - RNA, 19 nt, Artificial Sequence
  Synthetic Oligonucleotide
augggaauggggauccaaa

SEQ ID NO: 1995 - RNA, 19 nt, Artificial Sequence
  Synthetic Oligonucleotide
guugcaugggccucauaua

SEQ ID NO: 1996 - RNA, 19 nt, Artificial Sequence
  Synthetic Oligonucleotide
aaugggaauggggauccaa

SEQ ID NO: 1997 - RNA, 19 nt, Artificial Sequence
  Synthetic Oligonucleotide
aguugcaugggccucauau

SEQ ID NO: 1998 - RNA, 19 nt, Artificial Sequence
  Synthetic Oligonucleotide
cuuuguccaaaaugcccuc

SEQ ID NO: 1999 - RNA, 19 nt, Artificial Sequence
  Synthetic Oligonucleotide
gaugcaacgauucaaguga

SEQ ID NO: 2000 - RNA, 19 nt, Artificial Sequence
  Synthetic Oligonucleotide
agaugcaacgauucaagug

SEQ ID NO: 2001 - RNA, 19 nt, Artificial Sequence
  Synthetic Oligonucleotide
uugcaugggccucauauac

SEQ ID NO: 2002 - RNA, 19 nt, Artificial Sequence
  Synthetic Oligonucleotide
aaaugcccucaaugggaau

SEQ ID NO: 2003 - RNA, 19 nt, Artificial Sequence
  Synthetic Oligonucleotide
aaaaugcccucaaugggaa

SEQ ID NO: 2004 - RNA, 19 nt, Artificial Sequence
  Synthetic Oligonucleotide
caaaaugcccucaauggga

SEQ ID NO: 2005 - RNA, 19 nt, Artificial Sequence
  Synthetic Oligonucleotide
ccugucaccucugacuaag

SEQ ID NO: 2006 - RNA, 19 nt, Artificial Sequence
  Synthetic Oligonucleotide
ccaaaaugcccucaauggg

SEQ ID NO: 2007 - RNA, 19 nt, Artificial Sequence
  Synthetic Oligonucleotide
ugggaauggggauccaaau

SEQ ID NO: 2008 - RNA, 19 nt, Artificial Sequence
  Synthetic Oligonucleotide
uuggccugguaugugcaac

SEQ ID NO: 2009 - RNA, 19 nt, Artificial Sequence
  Synthetic Oligonucleotide
ggaucuugcacuugauauu

SEQ ID NO: 2010 - RNA, 19 nt, Artificial Sequence
  Synthetic Oligonucleotide
gggaucuugcacuugauau

SEQ ID NO: 2011 - RNA, 19 nt, Artificial Sequence
  Synthetic Oligonucleotide
acggaaggaguaccugagu

SEQ ID NO: 2012 - RNA, 19 nt, Artificial Sequence
  Synthetic Oligonucleotide
uuuggccugguaugugcaa

SEQ ID NO: 2013 - RNA, 19 nt, Artificial Sequence
  Synthetic Oligonucleotide
cggaaggaguaccugaguc

SEQ ID NO: 2014 - RNA, 19 nt, Artificial Sequence
  Synthetic Oligonucleotide
gcaaauggugcaggcaaug

SEQ ID NO: 2015 - RNA, 19 nt, Artificial Sequence
  Synthetic Oligonucleotide
aggcaaauggugcaggcaa

SEQ ID NO: 2016 - RNA, 19 nt, Artificial Sequence
  Synthetic Oligonucleotide
ggcaaauggugcaggcaau

SEQ ID NO: 2017 - RNA, 19 nt, Artificial Sequence
  Synthetic Oligonucleotide
uacggaaggaguaccugag

SEQ ID NO: 2018 - RNA, 19 nt, Artificial Sequence
  Synthetic Oligonucleotide
agucauuuugucagcauag

SEQ ID NO: 2019 - RNA, 19 nt, Artificial Sequence
  Synthetic Oligonucleotide
ggaguaccugagucuauga

SEQ ID NO: 2020 - RNA, 19 nt, Artificial Sequence
  Synthetic Oligonucleotide
gaguaccugagucuaugag

SEQ ID NO: 2021 - RNA, 19 nt, Artificial Sequence
  Synthetic Oligonucleotide
aguaccugagucuaugagg

SEQ ID NO: 2022 - RNA, 19 nt, Artificial Sequence
  Synthetic Oligonucleotide
gaucuugcacuugauauug

SEQ ID NO: 2023 - RNA, 19 nt, Artificial Sequence
  Synthetic Oligonucleotide
uucuacggaaggaguaccu

SEQ ID NO: 2024 - RNA, 19 nt, Artificial Sequence
  Synthetic Oligonucleotide
aagacaagaccaauccugu

SEQ ID NO: 2025 - RNA, 19 nt, Artificial Sequence
  Synthetic Oligonucleotide
agacaagaccaauccuguc

SEQ ID NO: 2026 - RNA, 19 nt, Artificial Sequence
  Synthetic Oligonucleotide
ggaaggaguaccugagucu

SEQ ID NO: 2027 - RNA, 19 nt, Artificial Sequence
  Synthetic Oligonucleotide
cuacggaaggaguaccuga

SEQ ID NO: 2028 - RNA, 19 nt, Artificial Sequence
  Synthetic Oligonucleotide
acaagaccaauccugucac

SEQ ID NO: 2029 - RNA, 19 nt, Artificial Sequence
  Synthetic Oligonucleotide
ucuacggaaggaguaccug

SEQ ID NO: 2030 - RNA, 19 nt, Artificial Sequence
  Synthetic Oligonucleotide
caagaccaauccugucacc

SEQ ID NO: 2031 - RNA, 19 nt, Artificial Sequence
  Synthetic Oligonucleotide
gacaagaccaauccuguca

SEQ ID NO: 2032 - RNA, 19 nt, Artificial Sequence
  Synthetic Oligonucleotide
aagaccaauccugucaccu

SEQ ID NO: 2033 - RNA, 19 nt, Artificial Sequence
  Synthetic Oligonucleotide
aggaguaccugagucuaug

SEQ ID NO: 2034 - RNA, 19 nt, Artificial Sequence
  Synthetic Oligonucleotide
ccaggcaaauggugcaggc

SEQ ID NO: 2035 - RNA, 19 nt, Artificial Sequence
  Synthetic Oligonucleotide
gaaggaguaccugagucua

SEQ ID NO: 2036 - RNA, 19 nt, Artificial Sequence
  Synthetic Oligonucleotide
gccuucuacggaaggagua

SEQ ID NO: 2037 - RNA, 19 nt, Artificial Sequence
  Synthetic Oligonucleotide
gaccaauccugucaccucu

SEQ ID NO: 2038 - RNA, 19 nt, Artificial Sequence
  Synthetic Oligonucleotide
aaggaguaccugagucuau

SEQ ID NO: 2039 - RNA, 19 nt, Artificial Sequence
  Synthetic Oligonucleotide
agaccaauccugucaccuc

SEQ ID NO: 2040 - RNA, 19 nt, Artificial Sequence
  Synthetic Oligonucleotide
gccaggcaaauggugcagg

SEQ ID NO: 2041 - RNA, 19 nt, Artificial Sequence
  Synthetic Oligonucleotide
aggccaggcaaauggugca

SEQ ID NO: 2042 - RNA, 19 nt, Artificial Sequence
  Synthetic Oligonucleotide
ggccaggcaaauggugcag

SEQ ID NO: 2043 - RNA, 19 nt, Artificial Sequence
  Synthetic Oligonucleotide
caauccugucaccucugac

SEQ ID NO: 2044 - RNA, 19 nt, Artificial Sequence
  Synthetic Oligonucleotide
ccaauccugucaccucuga

SEQ ID NO: 2045 - RNA, 19 nt, Artificial Sequence
  Synthetic Oligonucleotide
ggaucaagugagcaggcag

SEQ ID NO: 2046 - RNA, 19 nt, Artificial Sequence
  Synthetic Oligonucleotide
gaucaagugagcaggcagc

SEQ ID NO: 2047 - RNA, 19 nt, Artificial Sequence
  Synthetic Oligonucleotide
acauuccauggggccaaag

SEQ ID NO: 2048 - RNA, 19 nt, Artificial Sequence
  Synthetic Oligonucleotide
caggccaggcaaauggugc

SEQ ID NO: 2049 - RNA, 19 nt, Artificial Sequence
  Synthetic Oligonucleotide
cauuccauggggccaaaga

SEQ ID NO: 2050 - RNA, 19 nt, Artificial Sequence
  Synthetic Oligonucleotide
gaagaugucuuugcuggga

SEQ ID NO: 2051 - RNA, 19 nt, Artificial Sequence
  Synthetic Oligonucleotide
ugaagaugucuuugcuggg

SEQ ID NO: 2052 - RNA, 19 nt, Artificial Sequence
  Synthetic Oligonucleotide
aagaugucuuugcugggaa

SEQ ID NO: 2053 - RNA, 19 nt, Artificial Sequence
  Synthetic Oligonucleotide
accaauccugucaccucug

SEQ ID NO: 2054 - RNA, 19 nt, Artificial Sequence
  Synthetic Oligonucleotide
ucaggccaggcaaauggug

SEQ ID NO: 2055 - RNA, 19 nt, Artificial Sequence
  Synthetic Oligonucleotide
auuccauggggccaaagaa

SEQ ID NO: 2056 - RNA, 19 nt, Artificial Sequence
  Synthetic Oligonucleotide
uugccaguugcaugggccu

SEQ ID NO: 2057 - RNA, 19 nt, Artificial Sequence
  Synthetic Oligonucleotide
cuugccaguugcaugggcc

SEQ ID NO: 2058 - RNA, 19 nt, Artificial Sequence
  Synthetic Oligonucleotide
ugagucuaugagggaagaa

SEQ ID NO: 2059 - RNA, 19 nt, Artificial Sequence
  Synthetic Oligonucleotide
caggcaaauggugcaggca

SEQ ID NO: 2060 - RNA, 19 nt, Artificial Sequence
  Synthetic Oligonucleotide
gucaggccaggcaaauggu

SEQ ID NO: 2061 - RNA, 19 nt, Artificial Sequence
  Synthetic Oligonucleotide
agucaggccaggcaaaugg

SEQ ID NO: 2062 - RNA, 19 nt, Artificial Sequence
  Synthetic Oligonucleotide
uagucaggccaggcaaaug

SEQ ID NO: 2063 - RNA, 19 nt, Artificial Sequence
  Synthetic Oligonucleotide
gccaguugcaugggccuca

SEQ ID NO: 2064 - RNA, 19 nt, Artificial Sequence
  Synthetic Oligonucleotide
cuagucaggccaggcaaau

SEQ ID NO: 2065 - RNA, 19 nt, Artificial Sequence
  Synthetic Oligonucleotide
ccaguugcaugggccucau

SEQ ID NO: 2066 - RNA, 19 nt, Artificial Sequence
  Synthetic Oligonucleotide
gcuagucaggccaggcaaa

SEQ ID NO: 2067 - RNA, 19 nt, Artificial Sequence
  Synthetic Oligonucleotide
ugcuagucaggccaggcaa

SEQ ID NO: 2068 - RNA, 19 nt, Artificial Sequence
  Synthetic Oligonucleotide
ugccaguugcaugggccuc

SEQ ID NO: 2069 - RNA, 19 nt, Artificial Sequence
  Synthetic Oligonucleotide
cauuuugucagcauagagc

SEQ ID NO: 2070 - RNA, 19 nt, Artificial Sequence
  Synthetic Oligonucleotide
aauccugucaccucugacu

SEQ ID NO: 2071 - RNA, 19 nt, Artificial Sequence
  Synthetic Oligonucleotide
caguugcaugggccucaua

SEQ ID NO: 2072 - RNA, 19 nt, Artificial Sequence
  Synthetic Oligonucleotide
uggugcacuugccaguugc

SEQ ID NO: 2073 - RNA, 19 nt, Artificial Sequence
  Synthetic Oligonucleotide
acuugccaguugcaugggc

SEQ ID NO: 2074 - RNA, 19 nt, Artificial Sequence
  Synthetic Oligonucleotide
ucaagugagcaggcagcgg

SEQ ID NO: 2075 - RNA, 19 nt, Artificial Sequence
  Synthetic Oligonucleotide
caagugagcaggcagcgga

SEQ ID NO: 2076 - RNA, 19 nt, Artificial Sequence
  Synthetic Oligonucleotide
auuuugucagcauagagcu

SEQ ID NO: 2077 - RNA, 19 nt, Artificial Sequence
  Synthetic Oligonucleotide
aaagacaagaccaauccug

SEQ ID NO: 2078 - RNA, 19 nt, Artificial Sequence
  Synthetic Oligonucleotide
uaaagacaagaccaauccu

SEQ ID NO: 2079 - RNA, 19 nt, Artificial Sequence
  Synthetic Oligonucleotide
gcuaaagacaagaccaauc

SEQ ID NO: 2080 - RNA, 19 nt, Artificial Sequence
  Synthetic Oligonucleotide
cuaaagacaagaccaaucc

SEQ ID NO: 2081 - RNA, 19 nt, Artificial Sequence
  Synthetic Oligonucleotide
aacguauguucucucuauc

SEQ ID NO: 2082 - RNA, 19 nt, Artificial Sequence
  Synthetic Oligonucleotide
aaacguauguucucucuau

SEQ ID NO: 2083 - RNA, 19 nt, Artificial Sequence
  Synthetic Oligonucleotide
acguauguucucucuaucg

SEQ ID NO: 2084 - RNA, 19 nt, Artificial Sequence
  Synthetic Oligonucleotide
cguauguucucucuaucgu

SEQ ID NO: 2085 - RNA, 19 nt, Artificial Sequence
  Synthetic Oligonucleotide
gaaacguauguucucucua

SEQ ID NO: 2086 - RNA, 19 nt, Artificial Sequence
  Synthetic Oligonucleotide
aggucgaaacguauguucu

SEQ ID NO: 2087 - RNA, 19 nt, Artificial Sequence
  Synthetic Oligonucleotide
gaggucgaaacguauguuc

SEQ ID NO: 2088 - RNA, 19 nt, Artificial Sequence
  Synthetic Oligonucleotide
ggucgaaacguauguucuc

SEQ ID NO: 2089 - RNA, 19 nt, Artificial Sequence
  Synthetic Oligonucleotide
ucgaaacguauguucucuc

SEQ ID NO: 2090 - RNA, 19 nt, Artificial Sequence
  Synthetic Oligonucleotide
gucgaaacguauguucucu

SEQ ID NO: 2091 - RNA, 19 nt, Artificial Sequence
  Synthetic Oligonucleotide
cgaaacguauguucucucu

SEQ ID NO: 2092 - RNA, 19 nt, Artificial Sequence
  Synthetic Oligonucleotide
uugaauggaaugauaacac

SEQ ID NO: 2093 - RNA, 19 nt, Artificial Sequence
  Synthetic Oligonucleotide
gaauggaaugauaacacag

SEQ ID NO: 2094 - RNA, 19 nt, Artificial Sequence
  Synthetic Oligonucleotide
ugaauggaaugauaacaca

SEQ ID NO: 2095 - RNA, 19 nt, Artificial Sequence
  Synthetic Oligonucleotide
uggaaugauaacacaguuc

SEQ ID NO: 2096 - RNA, 19 nt, Artificial Sequence
  Synthetic Oligonucleotide
auggaaugauaacacaguu

SEQ ID NO: 2097 - RNA, 19 nt, Artificial Sequence
  Synthetic Oligonucleotide
aauggaaugauaacacagu

SEQ ID NO: 2098 - RNA, 19 nt, Artificial Sequence
  Synthetic Oligonucleotide
cuugaauggaaugauaaca

SEQ ID NO: 2099 - RNA, 19 nt, Artificial Sequence
  Synthetic Oligonucleotide
ugauaacacaguucgaguc

SEQ ID NO: 2100 - RNA, 19 nt, Artificial Sequence
  Synthetic Oligonucleotide
ggaaugauaacacaguucg

SEQ ID NO: 2101 - RNA, 19 nt, Artificial Sequence
  Synthetic Oligonucleotide
gaaugauaacacaguucga

SEQ ID NO: 2102 - RNA, 19 nt, Artificial Sequence
  Synthetic Oligonucleotide
augauaacacaguucgagu

SEQ ID NO: 2103 - RNA, 19 nt, Artificial Sequence
  Synthetic Oligonucleotide
aaugauaacacaguucgag

SEQ ID NO: 2104 - RNA, 19 nt, Artificial Sequence
  Synthetic Oligonucleotide
uaacacaguucgagucucu

SEQ ID NO: 2105 - RNA, 19 nt, Artificial Sequence
  Synthetic Oligonucleotide
auaacacaguucgagucuc

SEQ ID NO: 2106 - RNA, 19 nt, Artificial Sequence
  Synthetic Oligonucleotide
ugaggaugucaaaaaugca

SEQ ID NO: 2107 - RNA, 19 nt, Artificial Sequence
  Synthetic Oligonucleotide
augucaaaaaugcaauugg

SEQ ID NO: 2108 - RNA, 19 nt, Artificial Sequence
  Synthetic Oligonucleotide
aggaugucaaaaaugcaau

SEQ ID NO: 2109 - RNA, 19 nt, Artificial Sequence
  Synthetic Oligonucleotide
ggaugucaaaaaugcaauu

SEQ ID NO: 2110 - RNA, 19 nt, Artificial Sequence
  Synthetic Oligonucleotide
gaugucaaaaaugcaauug

SEQ ID NO: 2111 - RNA, 19 nt, Artificial Sequence
  Synthetic Oligonucleotide
gaggaugucaaaaaugcaa

SEQ ID NO: 2112 - RNA, 19 nt, Artificial Sequence
  Synthetic Oligonucleotide
gauaacacaguucgagucu

SEQ ID NO: 2113 - RNA, 19 nt, Artificial Sequence
  Synthetic Oligonucleotide
cggcuucgccgagaucaga

SEQ ID NO: 2114 - RNA, 19 nt, Artificial Sequence
  Synthetic Oligonucleotide
ugucaaaaaugcaauuggg

SEQ ID NO: 2115 - RNA, 19 nt, Artificial Sequence
  Synthetic Oligonucleotide
uacagagauucgcuuggag

SEQ ID NO: 2116 - RNA, 19 nt, Artificial Sequence
  Synthetic Oligonucleotide
acagagauucgcuuggaga

SEQ ID NO: 2117 - RNA, 19 nt, Artificial Sequence
  Synthetic Oligonucleotide
ucuacagagauucgcuugg

SEQ ID NO: 2118 - RNA, 19 nt, Artificial Sequence
  Synthetic Oligonucleotide
ggagcaauuguuggcgaaa

SEQ ID NO: 2119 - RNA, 19 nt, Artificial Sequence
  Synthetic Oligonucleotide
gagcaauuguuggcgaaau

SEQ ID NO: 2120 - RNA, 19 nt, Artificial Sequence
  Synthetic Oligonucleotide
gggagcaauuguuggcgaa

SEQ ID NO: 2121 - RNA, 19 nt, Artificial Sequence
  Synthetic Oligonucleotide
agggagcaauuguuggcga

SEQ ID NO: 2122 - RNA, 19 nt, Artificial Sequence
  Synthetic Oligonucleotide
gagggagcaauuguuggcg

SEQ ID NO: 2123 - RNA, 19 nt, Artificial Sequence
  Synthetic Oligonucleotide
agggcuuucaccgaagagg

SEQ ID NO: 2124 - RNA, 19 nt, Artificial Sequence
  Synthetic Oligonucleotide
gggcuuucaccgaagaggg

SEQ ID NO: 2125 - RNA, 19 nt, Artificial Sequence
  Synthetic Oligonucleotide
ugaaagcgaauuucagugu

SEQ ID NO: 2126 - RNA, 19 nt, Artificial Sequence
  Synthetic Oligonucleotide
uaagggcuuucaccgaaga

SEQ ID NO: 2127 - RNA, 19 nt, Artificial Sequence
  Synthetic Oligonucleotide
uugaucggcuucgccgaga

SEQ ID NO: 2128 - RNA, 19 nt, Artificial Sequence
  Synthetic Oligonucleotide
cuugaucggcuucgccgag

SEQ ID NO: 2129 - RNA, 19 nt, Artificial Sequence
  Synthetic Oligonucleotide
gaaagcgaauuucagugug

SEQ ID NO: 2130 - RNA, 19 nt, Artificial Sequence
  Synthetic Oligonucleotide
aagggcuuucaccgaagag

SEQ ID NO: 2131 - RNA, 19 nt, Artificial Sequence
  Synthetic Oligonucleotide
gaucggcuucgccgagauc

SEQ ID NO: 2132 - RNA, 19 nt, Artificial Sequence
  Synthetic Oligonucleotide
aucggcuucgccgagauca

SEQ ID NO: 2133 - RNA, 19 nt, Artificial Sequence
  Synthetic Oligonucleotide
cuaagggcuuucaccgaag

SEQ ID NO: 2134 - RNA, 19 nt, Artificial Sequence
  Synthetic Oligonucleotide
ugaucggcuucgccgagau

SEQ ID NO: 2135 - RNA, 19 nt, Artificial Sequence
  Synthetic Oligonucleotide
ugcaauugggguccucauc

SEQ ID NO: 2136 - RNA, 19 nt, Artificial Sequence
  Synthetic Oligonucleotide
gcaauugggguccucaucg

SEQ ID NO: 2137 - RNA, 19 nt, Artificial Sequence
  Synthetic Oligonucleotide
caauugggguccucaucgg

SEQ ID NO: 2138 - RNA, 19 nt, Artificial Sequence
  Synthetic Oligonucleotide
ucggcuucgccgagaucag

SEQ ID NO: 2139 - RNA, 19 nt, Artificial Sequence
  Synthetic Oligonucleotide
gcuuucaccgaagagggag

SEQ ID NO: 2140 - RNA, 19 nt, Artificial Sequence
  Synthetic Oligonucleotide
ggcuuucaccgaagaggga

SEQ ID NO: 2141 - RNA, 19 nt, Artificial Sequence
  Synthetic Oligonucleotide
ucaaaaaugcaauuggggu

SEQ ID NO: 2142 - RNA, 19 nt, Artificial Sequence
  Synthetic Oligonucleotide
gucaaaaaugcaauugggg

SEQ ID NO: 2143 - RNA, 19 nt, Artificial Sequence
  Synthetic Oligonucleotide
aaaugcaauugggguccuc

SEQ ID NO: 2144 - RNA, 19 nt, Artificial Sequence
  Synthetic Oligonucleotide
aaaaugcaauugggguccu

SEQ ID NO: 2145 - RNA, 19 nt, Artificial Sequence
  Synthetic Oligonucleotide
caaaaaugcaauugggguc

SEQ ID NO: 2146 - RNA, 19 nt, Artificial Sequence
  Synthetic Oligonucleotide
aaaaaugcaauuggggucc

SEQ ID NO: 2147 - RNA, 19 nt, Artificial Sequence
  Synthetic Oligonucleotide
aaugcaauugggguccuca

SEQ ID NO: 2148 - RNA, 19 nt, Artificial Sequence
  Synthetic Oligonucleotide
augcaauugggguccucau

SEQ ID NO: 2149 - RNA, 19 nt, Artificial Sequence
  Synthetic Oligonucleotide
acuaagggcuuucaccgaa

SEQ ID NO: 2150 - RNA, 19 nt, Artificial Sequence
  Synthetic Oligonucleotide
ucaccgaagagggagcaau

SEQ ID NO: 2151 - RNA, 19 nt, Artificial Sequence
  Synthetic Oligonucleotide
uuucaccgaagagggagca

SEQ ID NO: 2152 - RNA, 19 nt, Artificial Sequence
  Synthetic Oligonucleotide
aagagggagcaauuguugg

SEQ ID NO: 2153 - RNA, 19 nt, Artificial Sequence
  Synthetic Oligonucleotide
gaagagggagcaauuguug

SEQ ID NO: 2154 - RNA, 19 nt, Artificial Sequence
  Synthetic Oligonucleotide
uuccuugaucggcuucgcc

SEQ ID NO: 2155 - RNA, 19 nt, Artificial Sequence
  Synthetic Oligonucleotide
uccuugaucggcuucgccg

SEQ ID NO: 2156 - RNA, 19 nt, Artificial Sequence
  Synthetic Oligonucleotide
cuuucaccgaagagggagc

SEQ ID NO: 2157 - RNA, 19 nt, Artificial Sequence
  Synthetic Oligonucleotide
agagggagcaauuguuggc

SEQ ID NO: 2158 - RNA, 19 nt, Artificial Sequence
  Synthetic Oligonucleotide
uucaccgaagagggagcaa

SEQ ID NO: 2159 - RNA, 19 nt, Artificial Sequence
  Synthetic Oligonucleotide
uacuaagggcuuucaccga

SEQ ID NO: 2160 - RNA, 19 nt, Artificial Sequence
  Synthetic Oligonucleotide
accgaagagggagcaauug

SEQ ID NO: 2161 - RNA, 19 nt, Artificial Sequence
  Synthetic Oligonucleotide
caccgaagagggagcaauu

SEQ ID NO: 2162 - RNA, 19 nt, Artificial Sequence
  Synthetic Oligonucleotide
ccgaagagggagcaauugu

SEQ ID NO: 2163 - RNA, 19 nt, Artificial Sequence
  Synthetic Oligonucleotide
cgaagagggagcaauuguu

SEQ ID NO: 2164 - RNA, 19 nt, Artificial Sequence
  Synthetic Oligonucleotide
auaagauggcugauugaag

SEQ ID NO: 2165 - RNA, 19 nt, Artificial Sequence
  Synthetic Oligonucleotide
uaagauggcugauugaaga

SEQ ID NO: 2166 - RNA, 19 nt, Artificial Sequence
  Synthetic Oligonucleotide
aagauggcugauugaagaa

SEQ ID NO: 2167 - RNA, 19 nt, Artificial Sequence
  Synthetic Oligonucleotide
uuacuaagggcuuucaccg

SEQ ID NO: 2168 - RNA, 19 nt, Artificial Sequence
  Synthetic Oligonucleotide
gauggcugauugaagaagu

SEQ ID NO: 2169 - RNA, 19 nt, Artificial Sequence
  Synthetic Oligonucleotide
agauggcugauugaagaag

SEQ ID NO: 2170 - RNA, 19 nt, Artificial Sequence
  Synthetic Oligonucleotide
ccuugaucggcuucgccga

SEQ ID NO: 2171 - RNA, 19 nt, Artificial Sequence
  Synthetic Oligonucleotide
aaagcgaauuucaguguga

SEQ ID NO: 2172 - RNA, 19 nt, Artificial Sequence
  Synthetic Oligonucleotide
aagcgaauuucagugugau

SEQ ID NO: 2173 - RNA, 19 nt, Artificial Sequence
  Synthetic Oligonucleotide
auuacuaagggcuuucacc

SEQ ID NO: 2174 - RNA, 19 nt, Artificial Sequence
  Synthetic Oligonucleotide
acagaaacggaaaauggcg

SEQ ID NO: 2175 - RNA, 19 nt, Artificial Sequence
  Synthetic Oligonucleotide
cagagauucgcuuggagaa

SEQ ID NO: 2176 - RNA, 19 nt, Artificial Sequence
  Synthetic Oligonucleotide
agagauucgcuuggagaag

SEQ ID NO: 2177 - RNA, 19 nt, Artificial Sequence
  Synthetic Oligonucleotide
gagauucgcuuggagaagc

SEQ ID NO: 2178 - RNA, 19 nt, Artificial Sequence
  Synthetic Oligonucleotide
agauucgcuuggagaagca

SEQ ID NO: 2179 - RNA, 19 nt, Artificial Sequence
  Synthetic Oligonucleotide
cuuggagaagcaguaauga

SEQ ID NO: 2180 - RNA, 19 nt, Artificial Sequence
  Synthetic Oligonucleotide
uuggagaagcaguaaugag

SEQ ID NO: 2181 - RNA, 19 nt, Artificial Sequence
  Synthetic Oligonucleotide
cuacagagauucgcuugga

SEQ ID NO: 2182 - RNA, 19 nt, Artificial Sequence
  Synthetic Oligonucleotide
uggagaagcaguaaugaga

SEQ ID NO: 2183 - RNA, 19 nt, Artificial Sequence
  Synthetic Oligonucleotide
auucgcuuggagaagcagu

SEQ ID NO: 2184 - RNA, 19 nt, Artificial Sequence
  Synthetic Oligonucleotide
gauucgcuuggagaagcag

SEQ ID NO: 2185 - RNA, 19 nt, Artificial Sequence
  Synthetic Oligonucleotide
gcuuggagaagcaguaaug

SEQ ID NO: 2186 - RNA, 19 nt, Artificial Sequence
  Synthetic Oligonucleotide
uucgcuuggagaagcagua

SEQ ID NO: 2187 - RNA, 19 nt, Artificial Sequence
  Synthetic Oligonucleotide
ucgcuuggagaagcaguaa

SEQ ID NO: 2188 - RNA, 19 nt, Artificial Sequence
  Synthetic Oligonucleotide
cgcuuggagaagcaguaau

SEQ ID NO: 2189 - RNA, 19 nt, Artificial Sequence
  Synthetic Oligonucleotide
ggcugauugaagaagugag

SEQ ID NO: 2190 - RNA, 19 nt, Artificial Sequence
  Synthetic Oligonucleotide
uggcugauugaagaaguga

SEQ ID NO: 2191 - RNA, 19 nt, Artificial Sequence
  Synthetic Oligonucleotide
gugaugccccauuccuuga

SEQ ID NO: 2192 - RNA, 19 nt, Artificial Sequence
  Synthetic Oligonucleotide
auggcugauugaagaagug

SEQ ID NO: 2193 - RNA, 19 nt, Artificial Sequence
  Synthetic Oligonucleotide
agaaacggaaaauggcgag

SEQ ID NO: 2194 - RNA, 19 nt, Artificial Sequence
  Synthetic Oligonucleotide
cagaaacggaaaauggcga

SEQ ID NO: 2195 - RNA, 19 nt, Artificial Sequence
  Synthetic Oligonucleotide
gaaacggaaaauggcgaga

SEQ ID NO: 2196 - RNA, 19 nt, Artificial Sequence
  Synthetic Oligonucleotide
uaacugacaugacuauuga

SEQ ID NO: 2197 - RNA, 19 nt, Artificial Sequence
  Synthetic Oligonucleotide
aagcaguaaugagaauggg

SEQ ID NO: 2198 - RNA, 19 nt, Artificial Sequence
  Synthetic Oligonucleotide
gaagcaguaaugagaaugg

SEQ ID NO: 2199 - RNA, 19 nt, Artificial Sequence
  Synthetic Oligonucleotide
acggaaaauggcgagaaca

SEQ ID NO: 2200 - RNA, 19 nt, Artificial Sequence
  Synthetic Oligonucleotide
aacggaaaauggcgagaac

SEQ ID NO: 2201 - RNA, 19 nt, Artificial Sequence
  Synthetic Oligonucleotide
acacaguucgagucucuaa

SEQ ID NO: 2202 - RNA, 19 nt, Artificial Sequence
  Synthetic Oligonucleotide
aacacaguucgagucucua

SEQ ID NO: 2203 - RNA, 19 nt, Artificial Sequence
  Synthetic Oligonucleotide
aaacggaaaauggcgagaa

SEQ ID NO: 2204 - RNA, 19 nt, Artificial Sequence
  Synthetic Oligonucleotide
augaggcacuuaaaaugac

SEQ ID NO: 2205 - RNA, 19 nt, Artificial Sequence
  Synthetic Oligonucleotide
gaugaggcacuuaaaauga

SEQ ID NO: 2206 - RNA, 19 nt, Artificial Sequence
  Synthetic Oligonucleotide
acaguucgagucucuaaaa

SEQ ID NO: 2207 - RNA, 19 nt, Artificial Sequence
  Synthetic Oligonucleotide
cacaguucgagucucuaaa

SEQ ID NO: 2208 - RNA, 19 nt, Artificial Sequence
  Synthetic Oligonucleotide
ccauuccuugaucggcuuc

SEQ ID NO: 2209 - RNA, 19 nt, Artificial Sequence
  Synthetic Oligonucleotide
cauuccuugaucggcuucg

SEQ ID NO: 2210 - RNA, 19 nt, Artificial Sequence
  Synthetic Oligonucleotide
auuccuugaucggcuucgc

SEQ ID NO: 2211 - RNA, 19 nt, Artificial Sequence
  Synthetic Oligonucleotide
uugggguccucaucggagg

SEQ ID NO: 2212 - RNA, 19 nt, Artificial Sequence
  Synthetic Oligonucleotide
ugaggcacuuaaaaugacc

SEQ ID NO: 2213 - RNA, 19 nt, Artificial Sequence
  Synthetic Oligonucleotide
gaggcacuuaaaaugacca

SEQ ID NO: 2214 - RNA, 19 nt, Artificial Sequence
  Synthetic Oligonucleotide
aggcacuuaaaaugaccau

SEQ ID NO: 2215 - RNA, 19 nt, Artificial Sequence
  Synthetic Oligonucleotide
auugggguccucaucggag

SEQ ID NO: 2216 - RNA, 19 nt, Artificial Sequence
  Synthetic Oligonucleotide
gcacuuaaaaugaccaugg

SEQ ID NO: 2217 - RNA, 19 nt, Artificial Sequence
  Synthetic Oligonucleotide
ggcacuuaaaaugaccaug

SEQ ID NO: 2218 - RNA, 19 nt, Artificial Sequence
  Synthetic Oligonucleotide
aauugggguccucaucgga

SEQ ID NO: 2219 - RNA, 19 nt, Artificial Sequence
  Synthetic Oligonucleotide
gguucaugcuaaugcccaa

SEQ ID NO: 2220 - RNA, 19 nt, Artificial Sequence
  Synthetic Oligonucleotide
uauuacuaagggcuuucac

SEQ ID NO: 2221 - RNA, 19 nt, Artificial Sequence
  Synthetic Oligonucleotide
ugguucaugcuaaugccca

SEQ ID NO: 2222 - RNA, 19 nt, Artificial Sequence
  Synthetic Oligonucleotide
acugguucaugcuaaugcc

SEQ ID NO: 2223 - RNA, 19 nt, Artificial Sequence
  Synthetic Oligonucleotide
auggauuccaacacugugu

SEQ ID NO: 2224 - RNA, 19 nt, Artificial Sequence
  Synthetic Oligonucleotide
cugguucaugcuaaugccc

SEQ ID NO: 2225 - RNA, 19 nt, Artificial Sequence
  Synthetic Oligonucleotide
ugauugaagaagugagaca

SEQ ID NO: 2226 - RNA, 19 nt, Artificial Sequence
  Synthetic Oligonucleotide
cauacuauugaggauguca

SEQ ID NO: 2227 - RNA, 19 nt, Artificial Sequence
  Synthetic Oligonucleotide
auacuauugaggaugucaa

SEQ ID NO: 2228 - RNA, 19 nt, Artificial Sequence
  Synthetic Oligonucleotide
uacuauugaggaugucaaa

SEQ ID NO: 2229 - RNA, 19 nt, Artificial Sequence
  Synthetic Oligonucleotide
acuauugaggaugucaaaa

SEQ ID NO: 2230 - RNA, 19 nt, Artificial Sequence
  Synthetic Oligonucleotide
uugaggaugucaaaaaugc

SEQ ID NO: 2231 - RNA, 19 nt, Artificial Sequence
  Synthetic Oligonucleotide
acauacuauugaggauguc

SEQ ID NO: 2232 - RNA, 19 nt, Artificial Sequence
  Synthetic Oligonucleotide
ggacauacuauugaggaug

SEQ ID NO: 2233 - RNA, 19 nt, Artificial Sequence
  Synthetic Oligonucleotide
ucaugcuaaugcccaagca

SEQ ID NO: 2234 - RNA, 19 nt, Artificial Sequence
  Synthetic Oligonucleotide
caggacauacuauugagga

SEQ ID NO: 2235 - RNA, 19 nt, Artificial Sequence
  Synthetic Oligonucleotide
gacauacuauugaggaugu

SEQ ID NO: 2236 - RNA, 19 nt, Artificial Sequence
  Synthetic Oligonucleotide
aggacauacuauugaggau

SEQ ID NO: 2237 - RNA, 19 nt, Artificial Sequence
  Synthetic Oligonucleotide
auugaggaugucaaaaaug

SEQ ID NO: 2238 - RNA, 19 nt, Artificial Sequence
  Synthetic Oligonucleotide
uauugaggaugucaaaaau

SEQ ID NO: 2239 - RNA, 19 nt, Artificial Sequence
  Synthetic Oligonucleotide
ccaggacauacuauugagg

SEQ ID NO: 2240 - RNA, 19 nt, Artificial Sequence
  Synthetic Oligonucleotide
uccaggacauacuauugag

SEQ ID NO: 2241 - RNA, 19 nt, Artificial Sequence
  Synthetic Oligonucleotide
uuccaggacauacuauuga

SEQ ID NO: 2242 - RNA, 19 nt, Artificial Sequence
  Synthetic Oligonucleotide
cuauugaggaugucaaaaa

SEQ ID NO: 2243 - RNA, 19 nt, Artificial Sequence
  Synthetic Oligonucleotide
uucaugcuaaugcccaagc

SEQ ID NO: 2244 - RNA, 19 nt, Artificial Sequence
  Synthetic Oligonucleotide
guucaugcuaaugcccaag

SEQ ID NO: 2245 - RNA, 19 nt, Artificial Sequence
  Synthetic Oligonucleotide
gaugccccauuccuugauc

SEQ ID NO: 2246 - RNA, 19 nt, Artificial Sequence
  Synthetic Oligonucleotide
augccccauuccuugaucg

SEQ ID NO: 2247 - RNA, 19 nt, Artificial Sequence
  Synthetic Oligonucleotide
uugaaagcgaauuucagug

SEQ ID NO: 2248 - RNA, 19 nt, Artificial Sequence
  Synthetic Oligonucleotide
ccccauuccuugaucggcu

SEQ ID NO: 2249 - RNA, 19 nt, Artificial Sequence
  Synthetic Oligonucleotide
gacuugaauggaaugauaa

SEQ ID NO: 2250 - RNA, 19 nt, Artificial Sequence
  Synthetic Oligonucleotide
ggacuugaauggaaugaua

SEQ ID NO: 2251 - RNA, 19 nt, Artificial Sequence
  Synthetic Oligonucleotide
gccccauuccuugaucggc

SEQ ID NO: 2252 - RNA, 19 nt, Artificial Sequence
  Synthetic Oligonucleotide
acuugaauggaaugauaac

SEQ ID NO: 2253 - RNA, 19 nt, Artificial Sequence
  Synthetic Oligonucleotide
ugccccauuccuugaucgg

SEQ ID NO: 2254 - RNA, 19 nt, Artificial Sequence
  Synthetic Oligonucleotide
aacagaaacggaaaauggc

SEQ ID NO: 2255 - RNA, 19 nt, Artificial Sequence
  Synthetic Oligonucleotide
cccauuccuugaucggcuu

SEQ ID NO: 2256 - RNA, 19 nt, Artificial Sequence
  Synthetic Oligonucleotide
cugauugaagaagugagac

SEQ ID NO: 2257 - RNA, 19 nt, Artificial Sequence
  Synthetic Oligonucleotide
gcugauugaagaagugaga

SEQ ID NO: 2258 - RNA, 19 nt, Artificial Sequence
  Synthetic Oligonucleotide
ggagaagcaguaaugagaa

SEQ ID NO: 2259 - RNA, 19 nt, Artificial Sequence
  Synthetic Oligonucleotide
agaagcaguaaugagaaug

SEQ ID NO: 2260 - RNA, 19 nt, Artificial Sequence
  Synthetic Oligonucleotide
gagaagcaguaaugagaau

SEQ ID NO: 2261 - RNA, 19 nt, Artificial Sequence
  Synthetic Oligonucleotide
ugaugccccauuccuugau

SEQ ID NO: 2262 - RNA, 19 nt, Artificial Sequence
  Synthetic Oligonucleotide
uccaaaacagaaacggaaa

SEQ ID NO: 2263 - RNA, 19 nt, Artificial Sequence
  Synthetic Oligonucleotide
caaaacagaaacggaaaau

SEQ ID NO: 2264 - RNA, 19 nt, Artificial Sequence
  Synthetic Oligonucleotide
aaacagaaacggaaaaugg

SEQ ID NO: 2265 - RNA, 19 nt, Artificial Sequence
  Synthetic Oligonucleotide
aaaacagaaacggaaaaug

SEQ ID NO: 2266 - RNA, 19 nt, Artificial Sequence
  Synthetic Oligonucleotide
cuccaaaacagaaacggaa

SEQ ID NO: 2267 - RNA, 19 nt, Artificial Sequence
  Synthetic Oligonucleotide
uuguuggcgaaaucucacc

SEQ ID NO: 2268 - RNA, 19 nt, Artificial Sequence
  Synthetic Oligonucleotide
ccaaaacagaaacggaaaa

SEQ ID NO: 2269 - RNA, 19 nt, Artificial Sequence
  Synthetic Oligonucleotide
ggcgaaaucucaccauugc

SEQ ID NO: 2270 - RNA, 19 nt, Artificial Sequence
  Synthetic Oligonucleotide
uguuggcgaaaucucacca

SEQ ID NO: 2271 - RNA, 19 nt, Artificial Sequence
  Synthetic Oligonucleotide
ugacuauugaggaauuguc

SEQ ID NO: 2272 - RNA, 19 nt, Artificial Sequence
  Synthetic Oligonucleotide
agauaagauggcugauuga

SEQ ID NO: 2273 - RNA, 19 nt, Artificial Sequence
  Synthetic Oligonucleotide
gagauaagauggcugauug

SEQ ID NO: 2274 - RNA, 19 nt, Artificial Sequence
  Synthetic Oligonucleotide
uuggcgaaaucucaccauu

SEQ ID NO: 2275 - RNA, 19 nt, Artificial Sequence
  Synthetic Oligonucleotide
acuauugaggaauugucaa

SEQ ID NO: 2276 - RNA, 19 nt, Artificial Sequence
  Synthetic Oligonucleotide
gauaagauggcugauugaa

SEQ ID NO: 2277 - RNA, 19 nt, Artificial Sequence
  Synthetic Oligonucleotide
auuguuggcgaaaucucac

SEQ ID NO: 2278 - RNA, 19 nt, Artificial Sequence
  Synthetic Oligonucleotide
gacuauugaggaauuguca

SEQ ID NO: 2279 - RNA, 19 nt, Artificial Sequence
  Synthetic Oligonucleotide
cuauugaggaauugucaag

SEQ ID NO: 2280 - RNA, 19 nt, Artificial Sequence
  Synthetic Oligonucleotide
aauuguuggcgaaaucuca

SEQ ID NO: 2281 - RNA, 19 nt, Artificial Sequence
  Synthetic Oligonucleotide
uggcgaaaucucaccauug

SEQ ID NO: 2282 - RNA, 19 nt, Artificial Sequence
  Synthetic Oligonucleotide
guuggcgaaaucucaccau

SEQ ID NO: 2283 - RNA, 19 nt, Artificial Sequence
  Synthetic Oligonucleotide
aagagauaagauggcugau

SEQ ID NO: 2284 - RNA, 19 nt, Artificial Sequence
  Synthetic Oligonucleotide
gaagagauaagauggcuga

SEQ ID NO: 2285 - RNA, 19 nt, Artificial Sequence
  Synthetic Oligonucleotide
uucuuuuccaggacauacu

SEQ ID NO: 2286 - RNA, 19 nt, Artificial Sequence
  Synthetic Oligonucleotide
augacuauugaggaauugu

SEQ ID NO: 2287 - RNA, 19 nt, Artificial Sequence
  Synthetic Oligonucleotide
agagauaagauggcugauu

SEQ ID NO: 2288 - RNA, 19 nt, Artificial Sequence
  Synthetic Oligonucleotide
ucuuuuccaggacauacua

SEQ ID NO: 2289 - RNA, 19 nt, Artificial Sequence
  Synthetic Oligonucleotide
caauuguuggcgaaaucuc

SEQ ID NO: 2290 - RNA, 19 nt, Artificial Sequence
  Synthetic Oligonucleotide
gcaauuguuggcgaaaucu

SEQ ID NO: 2291 - RNA, 19 nt, Artificial Sequence
  Synthetic Oligonucleotide
gaaaucucaccauugccuu

SEQ ID NO: 2292 - RNA, 19 nt, Artificial Sequence
  Synthetic Oligonucleotide
aaaucucaccauugccuuc

SEQ ID NO: 2293 - RNA, 19 nt, Artificial Sequence
  Synthetic Oligonucleotide
cgaaaucucaccauugccu

SEQ ID NO: 2294 - RNA, 19 nt, Artificial Sequence
  Synthetic Oligonucleotide
gcgaaaucucaccauugcc

SEQ ID NO: 2295 - RNA, 19 nt, Artificial Sequence
  Synthetic Oligonucleotide
aaucucaccauugccuucu

SEQ ID NO: 2296 - RNA, 19 nt, Artificial Sequence
  Synthetic Oligonucleotide
acuccaaaacagaaacgga

SEQ ID NO: 2297 - RNA, 19 nt, Artificial Sequence
  Synthetic Oligonucleotide
caaauaacauucaugcaag

SEQ ID NO: 2298 - RNA, 19 nt, Artificial Sequence
  Synthetic Oligonucleotide
ugccuucuuuuccaggaca

SEQ ID NO: 2299 - RNA, 19 nt, Artificial Sequence
  Synthetic Oligonucleotide
ccuucuuuuccaggacaua

SEQ ID NO: 2300 - RNA, 19 nt, Artificial Sequence
  Synthetic Oligonucleotide
gccuucuuuuccaggacau

SEQ ID NO: 2301 - RNA, 19 nt, Artificial Sequence
  Synthetic Oligonucleotide
cuucuuuuccaggacauac

SEQ ID NO: 2302 - RNA, 19 nt, Artificial Sequence
  Synthetic Oligonucleotide
aaauaacauucaugcaagc

SEQ ID NO: 2303 - RNA, 19 nt, Artificial Sequence
  Synthetic Oligonucleotide
accauugccuucuuuucca

SEQ ID NO: 2304 - RNA, 19 nt, Artificial Sequence
  Synthetic Oligonucleotide
ccauugccuucuuuuccag

SEQ ID NO: 2305 - RNA, 19 nt, Artificial Sequence
  Synthetic Oligonucleotide
uugccuucuuuuccaggac

SEQ ID NO: 2306 - RNA, 19 nt, Artificial Sequence
  Synthetic Oligonucleotide
ucccuaaggggaagaggca

SEQ ID NO: 2307 - RNA, 19 nt, Artificial Sequence
  Synthetic Oligonucleotide
cauugccuucuuuuccagg

SEQ ID NO: 2308 - RNA, 19 nt, Artificial Sequence
  Synthetic Oligonucleotide
ucaccauugccuucuuuuc

SEQ ID NO: 2309 - RNA, 19 nt, Artificial Sequence
  Synthetic Oligonucleotide
caccauugccuucuuuucc

SEQ ID NO: 2310 - RNA, 19 nt, Artificial Sequence
  Synthetic Oligonucleotide
auugccuucuuuuccagga

SEQ ID NO: 2311 - RNA, 19 nt, Artificial Sequence
  Synthetic Oligonucleotide
agcaauuguuggcgaaauc

SEQ ID NO: 2312 - RNA, 19 nt, Artificial Sequence
  Synthetic Oligonucleotide
ugaugaggcacuuaaaaug

SEQ ID NO: 2313 - RNA, 19 nt, Artificial Sequence
  Synthetic Oligonucleotide
ucugaugaggcacuuaaaa

SEQ ID NO: 2314 - RNA, 19 nt, Artificial Sequence
  Synthetic Oligonucleotide
cugaugaggcacuuaaaau

SEQ ID NO: 2315 - RNA, 25 nt, Artificial Sequence
  Synthetic Oligonucleotide
agcauacuuacugacagccagacag

SEQ ID NO: 2316 - RNA, 25 nt, Artificial Sequence
  Synthetic Oligonucleotide
uacugacagccagacagcgaccaaa

SEQ ID NO: 2317 - RNA, 25 nt, Artificial Sequence
  Synthetic Oligonucleotide
cauacuuacugacagccagacagcg

SEQ ID NO: 2318 - RNA, 25 nt, Artificial Sequence
  Synthetic Oligonucleotide
cuuacugacagccagacagcgacca

SEQ ID NO: 2319 - RNA, 25 nt, Artificial Sequence
  Synthetic Oligonucleotide
uuacugacagccagacagcgaccaa

SEQ ID NO: 2320 - RNA, 25 nt, Artificial Sequence
  Synthetic Oligonucleotide
acuuacugacagccagacagcgacc

SEQ ID NO: 2321 - RNA, 25 nt, Artificial Sequence
  Synthetic Oligonucleotide
gcauacuuacugacagccagacagc

SEQ ID NO: 2322 - RNA, 25 nt, Artificial Sequence
  Synthetic Oligonucleotide
cugacagccagacagcgaccaaaag

SEQ ID NO: 2323 - RNA, 25 nt, Artificial Sequence
  Synthetic Oligonucleotide
auacuuacugacagccagacagcga

SEQ ID NO: 2324 - RNA, 25 nt, Artificial Sequence
  Synthetic Oligonucleotide
acugacagccagacagcgaccaaaa

SEQ ID NO: 2325 - RNA, 25 nt, Artificial Sequence
  Synthetic Oligonucleotide
uacuuacugacagccagacagcgac

SEQ ID NO: 2326 - RNA, 25 nt, Artificial Sequence
  Synthetic Oligonucleotide
agccagacagcgaccaaaagaauuc

SEQ ID NO: 2327 - RNA, 25 nt, Artificial Sequence
  Synthetic Oligonucleotide
gccagacagcgaccaaaagaauucg

SEQ ID NO: 2328 - RNA, 25 nt, Artificial Sequence
  Synthetic Oligonucleotide
gacagccagacagcgaccaaaagaa

SEQ ID NO: 2329 - RNA, 25 nt, Artificial Sequence
  Synthetic Oligonucleotide
ugacagccagacagcgaccaaaaga

SEQ ID NO: 2330 - RNA, 25 nt, Artificial Sequence
  Synthetic Oligonucleotide
acagccagacagcgaccaaaagaau

SEQ ID NO: 2331 - RNA, 25 nt, Artificial Sequence
  Synthetic Oligonucleotide
cagccagacagcgaccaaaagaauu

SEQ ID NO: 2332 - RNA, 25 nt, Artificial Sequence
  Synthetic Oligonucleotide
uagcauacuuacugacagccagaca

SEQ ID NO: 2333 - RNA, 25 nt, Artificial Sequence
  Synthetic Oligonucleotide
acucuagcauacuuacugacagcca

SEQ ID NO: 2334 - RNA, 25 nt, Artificial Sequence
  Synthetic Oligonucleotide
cucuagcauacuuacugacagccag

SEQ ID NO: 2335 - RNA, 25 nt, Artificial Sequence
  Synthetic Oligonucleotide
ucuagcauacuuacugacagccaga

SEQ ID NO: 2336 - RNA, 25 nt, Artificial Sequence
  Synthetic Oligonucleotide
cuagcauacuuacugacagccagac

SEQ ID NO: 2337 - RNA, 25 nt, Artificial Sequence
  Synthetic Oligonucleotide
cagacagcgaccaaaagaauucgga

SEQ ID NO: 2338 - RNA, 25 nt, Artificial Sequence
  Synthetic Oligonucleotide
gacagcgaccaaaagaauucggaug

SEQ ID NO: 2339 - RNA, 25 nt, Artificial Sequence
  Synthetic Oligonucleotide
agacagcgaccaaaagaauucggau

SEQ ID NO: 2340 - RNA, 25 nt, Artificial Sequence
  Synthetic Oligonucleotide
ccagacagcgaccaaaagaauucgg

SEQ ID NO: 2341 - RNA, 25 nt, Artificial Sequence
  Synthetic Oligonucleotide
acagcgaccaaaagaauucggaugg

SEQ ID NO: 2342 - RNA, 25 nt, Artificial Sequence
  Synthetic Oligonucleotide
gcgaccaaaagaauucggauggcca

SEQ ID NO: 2343 - RNA, 25 nt, Artificial Sequence
  Synthetic Oligonucleotide
cagcgaccaaaagaauucggauggc

SEQ ID NO: 2344 - RNA, 25 nt, Artificial Sequence
  Synthetic Oligonucleotide
cgaccaaaagaauucggauggccau

SEQ ID NO: 2345 - RNA, 25 nt, Artificial Sequence
  Synthetic Oligonucleotide
agcgaccaaaagaauucggauggcc

SEQ ID NO: 2346 - RNA, 25 nt, Artificial Sequence
  Synthetic Oligonucleotide
gacucuagcauacuuacugacagcc

SEQ ID NO: 2347 - RNA, 25 nt, Artificial Sequence
  Synthetic Oligonucleotide
gaccaaaagaauucggauggccauc

SEQ ID NO: 2348 - RNA, 25 nt, Artificial Sequence
  Synthetic Oligonucleotide
ugaaauggaugauggcaaugaaaua

SEQ ID NO: 2349 - RNA, 25 nt, Artificial Sequence
  Synthetic Oligonucleotide
accaaaagaauucggauggccauca

SEQ ID NO: 2350 - RNA, 25 nt, Artificial Sequence
  Synthetic Oligonucleotide
augaaauggaugauggcaaugaaau

SEQ ID NO: 2351 - RNA, 25 nt, Artificial Sequence
  Synthetic Oligonucleotide
ccaaaagaauucggauggccaucaa

SEQ ID NO: 2352 - RNA, 25 nt, Artificial Sequence
  Synthetic Oligonucleotide
caaaagaauucggauggccaucaau

SEQ ID NO: 2353 - RNA, 25 nt, Artificial Sequence
  Synthetic Oligonucleotide
aaaagaauucggauggccaucaauu

SEQ ID NO: 2354 - RNA, 25 nt, Artificial Sequence
  Synthetic Oligonucleotide
aaagaauucggauggccaucaauua

SEQ ID NO: 2355 - RNA, 25 nt, Artificial Sequence
  Synthetic Oligonucleotide
gggacucuagcauacuuacugacag

SEQ ID NO: 2356 - RNA, 25 nt, Artificial Sequence
  Synthetic Oligonucleotide
aaacgggacucuagcauacuuacug

SEQ ID NO: 2357 - RNA, 25 nt, Artificial Sequence
  Synthetic Oligonucleotide
aacgggacucuagcauacuuacuga

SEQ ID NO: 2358 - RNA, 25 nt, Artificial Sequence
  Synthetic Oligonucleotide
cgggacucuagcauacuuacugaca

SEQ ID NO: 2359 - RNA, 25 nt, Artificial Sequence
  Synthetic Oligonucleotide
acgggacucuagcauacuuacugac

SEQ ID NO: 2360 - RNA, 25 nt, Artificial Sequence
  Synthetic Oligonucleotide
ggacucuagcauacuuacugacagc

SEQ ID NO: 2361 - RNA, 25 nt, Artificial Sequence
  Synthetic Oligonucleotide
aaagguuaaaacauggaaccuuugg

SEQ ID NO: 2362 - RNA, 25 nt, Artificial Sequence
  Synthetic Oligonucleotide
gaaagguuaaaacauggaaccuuug

SEQ ID NO: 2363 - RNA, 25 nt, Artificial Sequence
  Synthetic Oligonucleotide
augaaacgaaaacgggacucuagca

SEQ ID NO: 2364 - RNA, 25 nt, Artificial Sequence
  Synthetic Oligonucleotide
ugaugguugcauacauguuagagag

SEQ ID NO: 2365 - RNA, 25 nt, Artificial Sequence
  Synthetic Oligonucleotide
ugaaacgaaaacgggacucuagcau

SEQ ID NO: 2366 - RNA, 25 nt, Artificial Sequence
  Synthetic Oligonucleotide
gaaacgaaaacgggacucuagcaua

SEQ ID NO: 2367 - RNA, 25 nt, Artificial Sequence
  Synthetic Oligonucleotide
aaacgaaaacgggacucuagcauac

SEQ ID NO: 2368 - RNA, 25 nt, Artificial Sequence
  Synthetic Oligonucleotide
gaaaacgggacucuagcauacuuac

SEQ ID NO: 2369 - RNA, 25 nt, Artificial Sequence
  Synthetic Oligonucleotide
aacgaaaacgggacucuagcauacu

SEQ ID NO: 2370 - RNA, 25 nt, Artificial Sequence
  Synthetic Oligonucleotide
cgaaaacgggacucuagcauacuua

SEQ ID NO: 2371 - RNA, 25 nt, Artificial Sequence
  Synthetic Oligonucleotide
acgaaaacgggacucuagcauacuu

SEQ ID NO: 2372 - RNA, 25 nt, Artificial Sequence
  Synthetic Oligonucleotide
aaaacgggacucuagcauacuuacu

SEQ ID NO: 2373 - RNA, 25 nt, Artificial Sequence
  Synthetic Oligonucleotide
uugaugguugcauacauguuagaga

SEQ ID NO: 2374 - RNA, 25 nt, Artificial Sequence
  Synthetic Oligonucleotide
gguuaaaacauggaaccuuuggccc

SEQ ID NO: 2375 - RNA, 25 nt, Artificial Sequence
  Synthetic Oligonucleotide
aagguuaaaacauggaaccuuuggc

SEQ ID NO: 2376 - RNA, 25 nt, Artificial Sequence
  Synthetic Oligonucleotide
agguuaaaacauggaaccuuuggcc

SEQ ID NO: 2377 - RNA, 25 nt, Artificial Sequence
  Synthetic Oligonucleotide
cacuuaggaugaaauggaugauggc

SEQ ID NO: 2378 - RNA, 25 nt, Artificial Sequence
  Synthetic Oligonucleotide
ucacuuaggaugaaauggaugaugg

SEQ ID NO: 2379 - RNA, 25 nt, Artificial Sequence
  Synthetic Oligonucleotide
aagaauucggauggccaucaauuaa

SEQ ID NO: 2380 - RNA, 25 nt, Artificial Sequence
  Synthetic Oligonucleotide
aggaugaaauggaugauggcaauga

SEQ ID NO: 2381 - RNA, 25 nt, Artificial Sequence
  Synthetic Oligonucleotide
ggaugaaauggaugauggcaaugaa

SEQ ID NO: 2382 - RNA, 25 nt, Artificial Sequence
  Synthetic Oligonucleotide
gaugaaauggaugauggcaaugaaa

SEQ ID NO: 2383 - RNA, 25 nt, Artificial Sequence
  Synthetic Oligonucleotide
uuaggaugaaauggaugauggcaau

SEQ ID NO: 2384 - RNA, 25 nt, Artificial Sequence
  Synthetic Oligonucleotide
uaggaugaaauggaugauggcaaug

SEQ ID NO: 2385 - RNA, 25 nt, Artificial Sequence
  Synthetic Oligonucleotide
cuuaggaugaaauggaugauggcaa

SEQ ID NO: 2386 - RNA, 25 nt, Artificial Sequence
  Synthetic Oligonucleotide
guaaugaaacgaaaacgggacucua

SEQ ID NO: 2387 - RNA, 25 nt, Artificial Sequence
  Synthetic Oligonucleotide
acuuaggaugaaauggaugauggca

SEQ ID NO: 2388 - RNA, 25 nt, Artificial Sequence
  Synthetic Oligonucleotide
uaaugaaacgaaaacgggacucuag

SEQ ID NO: 2389 - RNA, 25 nt, Artificial Sequence
  Synthetic Oligonucleotide
aaugaaacgaaaacgggacucuagc

SEQ ID NO: 2390 - RNA, 25 nt, Artificial Sequence
  Synthetic Oligonucleotide
uuaaaacauggaaccuuuggcccug

SEQ ID NO: 2391 - RNA, 25 nt, Artificial Sequence
  Synthetic Oligonucleotide
uaaaacauggaaccuuuggcccugu

SEQ ID NO: 2392 - RNA, 25 nt, Artificial Sequence
  Synthetic Oligonucleotide
guuaaaacauggaaccuuuggcccu

SEQ ID NO: 2393 - RNA, 25 nt, Artificial Sequence
  Synthetic Oligonucleotide
aagaacaagcuguggauauaugcaa

SEQ ID NO: 2394 - RNA, 25 nt, Artificial Sequence
  Synthetic Oligonucleotide
gaagaacaagcuguggauauaugca

SEQ ID NO: 2395 - RNA, 25 nt, Artificial Sequence
  Synthetic Oligonucleotide
uuugcagccgcuccaccaaagcaaa

SEQ ID NO: 2396 - RNA, 25 nt, Artificial Sequence
  Synthetic Oligonucleotide
uugcagccgcuccaccaaagcaaag

SEQ ID NO: 2397 - RNA, 25 nt, Artificial Sequence
  Synthetic Oligonucleotide
uugguaaugaaacgaaaacgggacu

SEQ ID NO: 2398 - RNA, 25 nt, Artificial Sequence
  Synthetic Oligonucleotide
ugguaaugaaacgaaaacgggacuc

SEQ ID NO: 2399 - RNA, 25 nt, Artificial Sequence
  Synthetic Oligonucleotide
agaauucggauggccaucaauuaau

SEQ ID NO: 2400 - RNA, 25 nt, Artificial Sequence
  Synthetic Oligonucleotide
gguaaugaaacgaaaacgggacucu

SEQ ID NO: 2401 - RNA, 25 nt, Artificial Sequence
  Synthetic Oligonucleotide
gcaacagcuauacucagaaaagcaa

SEQ ID NO: 2402 - RNA, 25 nt, Artificial Sequence
  Synthetic Oligonucleotide
caacagcuauacucagaaaagcaac

SEQ ID NO: 2403 - RNA, 25 nt, Artificial Sequence
  Synthetic Oligonucleotide
aacagcuauacucagaaaagcaacc

SEQ ID NO: 2404 - RNA, 25 nt, Artificial Sequence
  Synthetic Oligonucleotide
acagcuauacucagaaaagcaacca

SEQ ID NO: 2405 - RNA, 25 nt, Artificial Sequence
  Synthetic Oligonucleotide
cagcuauacucagaaaagcaaccag

SEQ ID NO: 2406 - RNA, 25 nt, Artificial Sequence
  Synthetic Oligonucleotide
gauugcaugauaaaagcaguuagag

SEQ ID NO: 2407 - RNA, 25 nt, Artificial Sequence
  Synthetic Oligonucleotide
auugcaugauaaaagcaguuagagg

SEQ ID NO: 2408 - RNA, 25 nt, Artificial Sequence
  Synthetic Oligonucleotide
gcaugauaaaagcaguuagagguga

SEQ ID NO: 2409 - RNA, 25 nt, Artificial Sequence
  Synthetic Oligonucleotide
ugcaugauaaaagcaguuagaggug

SEQ ID NO: 2410 - RNA, 25 nt, Artificial Sequence
  Synthetic Oligonucleotide
uugcaugauaaaagcaguuagaggu

SEQ ID NO: 2411 - RNA, 25 nt, Artificial Sequence
  Synthetic Oligonucleotide
augguugcauacauguuagagagag

SEQ ID NO: 2412 - RNA, 25 nt, Artificial Sequence
  Synthetic Oligonucleotide
ugguugcauacauguuagagagaga

SEQ ID NO: 2413 - RNA, 25 nt, Artificial Sequence
  Synthetic Oligonucleotide
auguacacuccagguggagaaguga

SEQ ID NO: 2414 - RNA, 25 nt, Artificial Sequence
  Synthetic Oligonucleotide
gaugguugcauacauguuagagaga

SEQ ID NO: 2415 - RNA, 25 nt, Artificial Sequence
  Synthetic Oligonucleotide
uugcauacauguuagagagagaacu

SEQ ID NO: 2416 - RNA, 25 nt, Artificial Sequence
  Synthetic Oligonucleotide
guugcauacauguuagagagagaac

SEQ ID NO: 2417 - RNA, 25 nt, Artificial Sequence
  Synthetic Oligonucleotide
cauacauguuagagagagaacuugu

SEQ ID NO: 2418 - RNA, 25 nt, Artificial Sequence
  Synthetic Oligonucleotide
gguugcauacauguuagagagagaa

SEQ ID NO: 2419 - RNA, 25 nt, Artificial Sequence
  Synthetic Oligonucleotide
gcauacauguuagagagagaacuug

SEQ ID NO: 2420 - RNA, 25 nt, Artificial Sequence
  Synthetic Oligonucleotide
uguacacuccagguggagaagugag

SEQ ID NO: 2421 - RNA, 25 nt, Artificial Sequence
  Synthetic Oligonucleotide
ugcauacauguuagagagagaacuu

SEQ ID NO: 2422 - RNA, 25 nt, Artificial Sequence
  Synthetic Oligonucleotide
uggauauaugcaaggcugcaauggg

SEQ ID NO: 2423 - RNA, 25 nt, Artificial Sequence
  Synthetic Oligonucleotide
guggauauaugcaaggcugcaaugg

SEQ ID NO: 2424 - RNA, 25 nt, Artificial Sequence
  Synthetic Oligonucleotide
ugagaauacuuguaaggggcaauuc

SEQ ID NO: 2425 - RNA, 25 nt, Artificial Sequence
  Synthetic Oligonucleotide
augagaauacuuguaaggggcaauu

SEQ ID NO: 2426 - RNA, 25 nt, Artificial Sequence
  Synthetic Oligonucleotide
uacacuccagguggagaagugagga

SEQ ID NO: 2427 - RNA, 25 nt, Artificial Sequence
  Synthetic Oligonucleotide
guacacuccagguggagaagugagg

SEQ ID NO: 2428 - RNA, 25 nt, Artificial Sequence
  Synthetic Oligonucleotide
acacuccagguggagaagugaggaa

SEQ ID NO: 2429 - RNA, 25 nt, Artificial Sequence
  Synthetic Oligonucleotide
gagaauacuuguaaggggcaauucu

SEQ ID NO: 2430 - RNA, 25 nt, Artificial Sequence
  Synthetic Oligonucleotide
agaauacuuguaaggggcaauucuc

SEQ ID NO: 2431 - RNA, 25 nt, Artificial Sequence
  Synthetic Oligonucleotide
gaauacuuguaaggggcaauucucc

SEQ ID NO: 2432 - RNA, 25 nt, Artificial Sequence
  Synthetic Oligonucleotide
cacuccagguggagaagugaggaau

SEQ ID NO: 2433 - RNA, 25 nt, Artificial Sequence
  Synthetic Oligonucleotide
acuccagguggagaagugaggaaug

SEQ ID NO: 2434 - RNA, 25 nt, Artificial Sequence
  Synthetic Oligonucleotide
cuccagguggagaagugaggaauga

SEQ ID NO: 2435 - RNA, 25 nt, Artificial Sequence
  Synthetic Oligonucleotide
augucgcagucucgcacucgcgaga

SEQ ID NO: 2436 - RNA, 25 nt, Artificial Sequence
  Synthetic Oligonucleotide
gucgcagucucgcacucgcgagaua

SEQ ID NO: 2437 - RNA, 25 nt, Artificial Sequence
  Synthetic Oligonucleotide
ugucgcagucucgcacucgcgagau

SEQ ID NO: 2438 - RNA, 25 nt, Artificial Sequence
  Synthetic Oligonucleotide
gcuguggauauaugcaaggcugcaa

SEQ ID NO: 2439 - RNA, 25 nt, Artificial Sequence
  Synthetic Oligonucleotide
cuguggauauaugcaaggcugcaau

SEQ ID NO: 2440 - RNA, 25 nt, Artificial Sequence
  Synthetic Oligonucleotide
aggccauuagaggccaauacagugg

SEQ ID NO: 2441 - RNA, 25 nt, Artificial Sequence
  Synthetic Oligonucleotide
aagcuguggauauaugcaaggcugc

SEQ ID NO: 2442 - RNA, 25 nt, Artificial Sequence
  Synthetic Oligonucleotide
caagcuguggauauaugcaaggcug

SEQ ID NO: 2443 - RNA, 25 nt, Artificial Sequence
  Synthetic Oligonucleotide
uguggauauaugcaaggcugcaaug

SEQ ID NO: 2444 - RNA, 25 nt, Artificial Sequence
  Synthetic Oligonucleotide
gaccauauggccauaauuaagaagu

SEQ ID NO: 2445 - RNA, 25 nt, Artificial Sequence
  Synthetic Oligonucleotide
accauauggccauaauuaagaagua

SEQ ID NO: 2446 - RNA, 25 nt, Artificial Sequence
  Synthetic Oligonucleotide
agcuguggauauaugcaaggcugca

SEQ ID NO: 2447 - RNA, 25 nt, Artificial Sequence
  Synthetic Oligonucleotide
guaucagcagauccacuagcaucuu

SEQ ID NO: 2448 - RNA, 25 nt, Artificial Sequence
  Synthetic Oligonucleotide
uaucagcagauccacuagcaucuuu

SEQ ID NO: 2449 - RNA, 25 nt, Artificial Sequence
  Synthetic Oligonucleotide
aaggccauuagaggccaauacagug

SEQ ID NO: 2450 - RNA, 25 nt, Artificial Sequence
  Synthetic Oligonucleotide
aucagcagauccacuagcaucuuua

SEQ ID NO: 2451 - RNA, 25 nt, Artificial Sequence
  Synthetic Oligonucleotide
ucagcagauccacuagcaucuuuau

SEQ ID NO: 2452 - RNA, 25 nt, Artificial Sequence
  Synthetic Oligonucleotide
cagcagauccacuagcaucuuuauu

SEQ ID NO: 2453 - RNA, 25 nt, Artificial Sequence
  Synthetic Oligonucleotide
caagcacagagaugucaaugagagg

SEQ ID NO: 2454 - RNA, 25 nt, Artificial Sequence
  Synthetic Oligonucleotide
ccaagcacagagaugucaaugagag

SEQ ID NO: 2455 - RNA, 25 nt, Artificial Sequence
  Synthetic Oligonucleotide
guggaccauauggccauaauuaaga

SEQ ID NO: 2456 - RNA, 25 nt, Artificial Sequence
  Synthetic Oligonucleotide
ggaucagggaugagaauacuuguaa

SEQ ID NO: 2457 - RNA, 25 nt, Artificial Sequence
  Synthetic Oligonucleotide
uggaccauauggccauaauuaagaa

SEQ ID NO: 2458 - RNA, 25 nt, Artificial Sequence
  Synthetic Oligonucleotide
gaucagggaugagaauacuuguaag

SEQ ID NO: 2459 - RNA, 25 nt, Artificial Sequence
  Synthetic Oligonucleotide
aggggaucagggaugagaauacuug

SEQ ID NO: 2460 - RNA, 25 nt, Artificial Sequence
  Synthetic Oligonucleotide
ggggaucagggaugagaauacuugu

SEQ ID NO: 2461 - RNA, 25 nt, Artificial Sequence
  Synthetic Oligonucleotide
acaguggaccauauggccauaauua

SEQ ID NO: 2462 - RNA, 25 nt, Artificial Sequence
  Synthetic Oligonucleotide
auggccauaauuaagaaguacacau

SEQ ID NO: 2463 - RNA, 25 nt, Artificial Sequence
  Synthetic Oligonucleotide
accacaguggaccauauggccauaa

SEQ ID NO: 2464 - RNA, 25 nt, Artificial Sequence
  Synthetic Oligonucleotide
gggaucagggaugagaauacuugua

SEQ ID NO: 2465 - RNA, 25 nt, Artificial Sequence
  Synthetic Oligonucleotide
uggccauaauuaagaaguacacauc

SEQ ID NO: 2466 - RNA, 25 nt, Artificial Sequence
  Synthetic Oligonucleotide
ccacaguggaccauauggccauaau

SEQ ID NO: 2467 - RNA, 25 nt, Artificial Sequence
  Synthetic Oligonucleotide
ucgcagucucgcacucgcgagauac

SEQ ID NO: 2468 - RNA, 25 nt, Artificial Sequence
  Synthetic Oligonucleotide
cgcagucucgcacucgcgagauacu

SEQ ID NO: 2469 - RNA, 25 nt, Artificial Sequence
  Synthetic Oligonucleotide
cacaguggaccauauggccauaauu

SEQ ID NO: 2470 - RNA, 25 nt, Artificial Sequence
  Synthetic Oligonucleotide
caguggaccauauggccauaauuaa

SEQ ID NO: 2471 - RNA, 25 nt, Artificial Sequence
  Synthetic Oligonucleotide
gugaggggaucagggaugagaauac

SEQ ID NO: 2472 - RNA, 25 nt, Artificial Sequence
  Synthetic Oligonucleotide
gaggggaucagggaugagaauacuu

SEQ ID NO: 2473 - RNA, 25 nt, Artificial Sequence
  Synthetic Oligonucleotide
ugaggggaucagggaugagaauacu

SEQ ID NO: 2474 - RNA, 25 nt, Artificial Sequence
  Synthetic Oligonucleotide
uauggccauaauuaagaaguacaca

SEQ ID NO: 2475 - RNA, 25 nt, Artificial Sequence
  Synthetic Oligonucleotide
aaugugaggggaucagggaugagaa

SEQ ID NO: 2476 - RNA, 25 nt, Artificial Sequence
  Synthetic Oligonucleotide
ugugaggggaucagggaugagaaua

SEQ ID NO: 2477 - RNA, 25 nt, Artificial Sequence
  Synthetic Oligonucleotide
augugaggggaucagggaugagaau

SEQ ID NO: 2478 - RNA, 25 nt, Artificial Sequence
  Synthetic Oligonucleotide
ggaccauauggccauaauuaagaag

SEQ ID NO: 2479 - RNA, 25 nt, Artificial Sequence
  Synthetic Oligonucleotide
ccacuagcaucuuuauuggagaugu

SEQ ID NO: 2480 - RNA, 25 nt, Artificial Sequence
  Synthetic Oligonucleotide
auggaaagaauaaaagaacuacgga

SEQ ID NO: 2481 - RNA, 25 nt, Artificial Sequence
  Synthetic Oligonucleotide
auauggccauaauuaagaaguacac

SEQ ID NO: 2482 - RNA, 25 nt, Artificial Sequence
  Synthetic Oligonucleotide
cacuagcaucuuuauuggagaugug

SEQ ID NO: 2483 - RNA, 25 nt, Artificial Sequence
  Synthetic Oligonucleotide
cauauggccauaauuaagaaguaca

SEQ ID NO: 2484 - RNA, 25 nt, Artificial Sequence
  Synthetic Oligonucleotide
ugacuccaagcacagagaugucaau

SEQ ID NO: 2485 - RNA, 25 nt, Artificial Sequence
  Synthetic Oligonucleotide
augacuccaagcacagagaugucaa

SEQ ID NO: 2486 - RNA, 25 nt, Artificial Sequence
  Synthetic Oligonucleotide
caguaucagcagauccacuagcauc

SEQ ID NO: 2487 - RNA, 25 nt, Artificial Sequence
  Synthetic Oligonucleotide
gacuccaagcacagagaugucaaug

SEQ ID NO: 2488 - RNA, 25 nt, Artificial Sequence
  Synthetic Oligonucleotide
cuccaagcacagagaugucaaugag

SEQ ID NO: 2489 - RNA, 25 nt, Artificial Sequence
  Synthetic Oligonucleotide
gucacuuaggaugaaauggaugaug

SEQ ID NO: 2490 - RNA, 25 nt, Artificial Sequence
  Synthetic Oligonucleotide
cgucacuuaggaugaaauggaugau

SEQ ID NO: 2491 - RNA, 25 nt, Artificial Sequence
  Synthetic Oligonucleotide
acuccaagcacagagaugucaauga

SEQ ID NO: 2492 - RNA, 25 nt, Artificial Sequence
  Synthetic Oligonucleotide
aacccgucacuuaggaugaaaugga

SEQ ID NO: 2493 - RNA, 25 nt, Artificial Sequence
  Synthetic Oligonucleotide
acccgucacuuaggaugaaauggau

SEQ ID NO: 2494 - RNA, 25 nt, Artificial Sequence
  Synthetic Oligonucleotide
ccgucacuuaggaugaaauggauga

SEQ ID NO: 2495 - RNA, 25 nt, Artificial Sequence
  Synthetic Oligonucleotide
cccgucacuuaggaugaaauggaug

SEQ ID NO: 2496 - RNA, 25 nt, Artificial Sequence
  Synthetic Oligonucleotide
gcaguaucagcagauccacuagcau

SEQ ID NO: 2497 - RNA, 25 nt, Artificial Sequence
  Synthetic Oligonucleotide
cagggaugagaauacuuguaagggg

SEQ ID NO: 2498 - RNA, 25 nt, Artificial Sequence
  Synthetic Oligonucleotide
acuagcaucuuuauuggagaugugc

SEQ ID NO: 2499 - RNA, 25 nt, Artificial Sequence
  Synthetic Oligonucleotide
aguggaccauauggccauaauuaag

SEQ ID NO: 2500 - RNA, 25 nt, Artificial Sequence
  Synthetic Oligonucleotide
aguaucagcagauccacuagcaucu

SEQ ID NO: 2501 - RNA, 25 nt, Artificial Sequence
  Synthetic Oligonucleotide
cuagcaucuuuauuggagaugugcc

SEQ ID NO: 2502 - RNA, 25 nt, Artificial Sequence
  Synthetic Oligonucleotide
ucagggaugagaauacuuguaaggg

SEQ ID NO: 2503 - RNA, 25 nt, Artificial Sequence
  Synthetic Oligonucleotide
uagcaucuuuauuggagaugugcca

SEQ ID NO: 2504 - RNA, 25 nt, Artificial Sequence
  Synthetic Oligonucleotide
uccaagcacagagaugucaaugaga

SEQ ID NO: 2505 - RNA, 25 nt, Artificial Sequence
  Synthetic Oligonucleotide
cuuuauuggagaugugccacagcac

SEQ ID NO: 2506 - RNA, 25 nt, Artificial Sequence
  Synthetic Oligonucleotide
acaagcuguggauauaugcaaggcu

SEQ ID NO: 2507 - RNA, 25 nt, Artificial Sequence
  Synthetic Oligonucleotide
aacaagcuguggauauaugcaaggc

SEQ ID NO: 2508 - RNA, 25 nt, Artificial Sequence
  Synthetic Oligonucleotide
gaacaagcuguggauauaugcaagg

SEQ ID NO: 2509 - RNA, 25 nt, Artificial Sequence
  Synthetic Oligonucleotide
ucuuuauuggagaugugccacagca

SEQ ID NO: 2510 - RNA, 25 nt, Artificial Sequence
  Synthetic Oligonucleotide
gcaucuuuauuggagaugugccaca

SEQ ID NO: 2511 - RNA, 25 nt, Artificial Sequence
  Synthetic Oligonucleotide
aucuuuauuggagaugugccacagc

SEQ ID NO: 2512 - RNA, 25 nt, Artificial Sequence
  Synthetic Oligonucleotide
caucuuuauuggagaugugccacag

SEQ ID NO: 2513 - RNA, 25 nt, Artificial Sequence
  Synthetic Oligonucleotide
agcaucuuuauuggagaugugccac

SEQ ID NO: 2514 - RNA, 25 nt, Artificial Sequence
  Synthetic Oligonucleotide
aucagggaugagaauacuuguaagg

SEQ ID NO: 2515 - RNA, 25 nt, Artificial Sequence
  Synthetic Oligonucleotide
ggaugagaauacuuguaaggggcaa

SEQ ID NO: 2516 - RNA, 25 nt, Artificial Sequence
  Synthetic Oligonucleotide
acaaaaaccacaguggaccauaugg

SEQ ID NO: 2517 - RNA, 25 nt, Artificial Sequence
  Synthetic Oligonucleotide
agaacaagcuguggauauaugcaag

SEQ ID NO: 2518 - RNA, 25 nt, Artificial Sequence
  Synthetic Oligonucleotide
caaaaaccacaguggaccauauggc

SEQ ID NO: 2519 - RNA, 25 nt, Artificial Sequence
  Synthetic Oligonucleotide
uuauuggagaugugccacagcacac

SEQ ID NO: 2520 - RNA, 25 nt, Artificial Sequence
  Synthetic Oligonucleotide
agggaugagaauacuuguaaggggc

SEQ ID NO: 2521 - RNA, 25 nt, Artificial Sequence
  Synthetic Oligonucleotide
gggaugagaauacuuguaaggggca

SEQ ID NO: 2522 - RNA, 25 nt, Artificial Sequence
  Synthetic Oligonucleotide
aaaaccacaguggaccauauggcca

SEQ ID NO: 2523 - RNA, 25 nt, Artificial Sequence
  Synthetic Oligonucleotide
aaaccacaguggaccauauggccau

SEQ ID NO: 2524 - RNA, 25 nt, Artificial Sequence
  Synthetic Oligonucleotide
aaccacaguggaccauauggccaua

SEQ ID NO: 2525 - RNA, 25 nt, Artificial Sequence
  Synthetic Oligonucleotide
uuuauuggagaugugccacagcaca

SEQ ID NO: 2526 - RNA, 25 nt, Artificial Sequence
  Synthetic Oligonucleotide
aaaaaccacaguggaccauauggcc

SEQ ID NO: 2527 - RNA, 25 nt, Artificial Sequence
  Synthetic Oligonucleotide
gaugagaauacuuguaaggggcaau

SEQ ID NO: 2528 - RNA, 25 nt, Artificial Sequence
  Synthetic Oligonucleotide
caguuagaggugaccugaauuucgu

SEQ ID NO: 2529 - RNA, 25 nt, Artificial Sequence
  Synthetic Oligonucleotide
aaagcaguuagaggugaccugaauu

SEQ ID NO: 2530 - RNA, 25 nt, Artificial Sequence
  Synthetic Oligonucleotide
uaaaagcaguuagaggugaccugaa

SEQ ID NO: 2531 - RNA, 25 nt, Artificial Sequence
  Synthetic Oligonucleotide
aagcaguuagaggugaccugaauuu

SEQ ID NO: 2532 - RNA, 25 nt, Artificial Sequence
  Synthetic Oligonucleotide
uauucaacuacaacaagaccacuaa

SEQ ID NO: 2533 - RNA, 25 nt, Artificial Sequence
  Synthetic Oligonucleotide
aaaagcaguuagaggugaccugaau

SEQ ID NO: 2534 - RNA, 25 nt, Artificial Sequence
  Synthetic Oligonucleotide
gcaguuagaggugaccugaauuucg

SEQ ID NO: 2535 - RNA, 25 nt, Artificial Sequence
  Synthetic Oligonucleotide
uauuggagaugugccacagcacaca

SEQ ID NO: 2536 - RNA, 25 nt, Artificial Sequence
  Synthetic Oligonucleotide
uuuuaaggcauuuucagaaagaugc

SEQ ID NO: 2537 - RNA, 25 nt, Artificial Sequence
  Synthetic Oligonucleotide
ccauauggccauaauuaagaaguac

SEQ ID NO: 2538 - RNA, 25 nt, Artificial Sequence
  Synthetic Oligonucleotide
agcaguuagaggugaccugaauuuc

SEQ ID NO: 2539 - RNA, 25 nt, Artificial Sequence
  Synthetic Oligonucleotide
auaaaagcaguuagaggugaccuga

SEQ ID NO: 2540 - RNA, 25 nt, Artificial Sequence
  Synthetic Oligonucleotide
cuuuuaaggcauuuucagaaagaug

SEQ ID NO: 2541 - RNA, 25 nt, Artificial Sequence
  Synthetic Oligonucleotide
gauaaaagcaguuagaggugaccug

SEQ ID NO: 2542 - RNA, 25 nt, Artificial Sequence
  Synthetic Oligonucleotide
ugauaaaagcaguuagaggugaccu

SEQ ID NO: 2543 - RNA, 25 nt, Artificial Sequence
  Synthetic Oligonucleotide
augauaaaagcaguuagaggugacc

SEQ ID NO: 2544 - RNA, 25 nt, Artificial Sequence
  Synthetic Oligonucleotide
uguuguacaacaaaauggaauuuga

SEQ ID NO: 2545 - RNA, 25 nt, Artificial Sequence
  Synthetic Oligonucleotide
auguuguacaacaaaauggaauuug

SEQ ID NO: 2546 - RNA, 25 nt, Artificial Sequence
  Synthetic Oligonucleotide
uuuucacaagaggauugcaugauaa

SEQ ID NO: 2547 - RNA, 25 nt, Artificial Sequence
  Synthetic Oligonucleotide
guguuuucacaagaggauugcauga

SEQ ID NO: 2548 - RNA, 25 nt, Artificial Sequence
  Synthetic Oligonucleotide
uuucacaagaggauugcaugauaaa

SEQ ID NO: 2549 - RNA, 25 nt, Artificial Sequence
  Synthetic Oligonucleotide
uguuuucacaagaggauugcaugau

SEQ ID NO: 2550 - RNA, 25 nt, Artificial Sequence
  Synthetic Oligonucleotide
guuuucacaagaggauugcaugaua

SEQ ID NO: 2551 - RNA, 25 nt, Artificial Sequence
  Synthetic Oligonucleotide
ucacaagaggauugcaugauaaaag

SEQ ID NO: 2552 - RNA, 25 nt, Artificial Sequence
  Synthetic Oligonucleotide
cacaagaggauugcaugauaaaagc

SEQ ID NO: 2553 - RNA, 25 nt, Artificial Sequence
  Synthetic Oligonucleotide
uucacaagaggauugcaugauaaaa

SEQ ID NO: 2554 - RNA, 25 nt, Artificial Sequence
  Synthetic Oligonucleotide
caauguuguacaacaaaauggaauu

SEQ ID NO: 2555 - RNA, 25 nt, Artificial Sequence
  Synthetic Oligonucleotide
aauguuguacaacaaaauggaauuu

SEQ ID NO: 2556 - RNA, 25 nt, Artificial Sequence
  Synthetic Oligonucleotide
guauucaacuacaacaagaccacua

SEQ ID NO: 2557 - RNA, 25 nt, Artificial Sequence
  Synthetic Oligonucleotide
gaggauugcaugauaaaagcaguua

SEQ ID NO: 2558 - RNA, 25 nt, Artificial Sequence
  Synthetic Oligonucleotide
aggauugcaugauaaaagcaguuag

SEQ ID NO: 2559 - RNA, 25 nt, Artificial Sequence
  Synthetic Oligonucleotide
ggauugcaugauaaaagcaguuaga

SEQ ID NO: 2560 - RNA, 25 nt, Artificial Sequence
  Synthetic Oligonucleotide
accacccagauaauaaagcuucucc

SEQ ID NO: 2561 - RNA, 25 nt, Artificial Sequence
  Synthetic Oligonucleotide
gacaggaaaagaacccgucacuuag

SEQ ID NO: 2562 - RNA, 25 nt, Artificial Sequence
  Synthetic Oligonucleotide
agacaggaaaagaacccgucacuua

SEQ ID NO: 2563 - RNA, 25 nt, Artificial Sequence
  Synthetic Oligonucleotide
ccacccagauaauaaagcuucuccc

SEQ ID NO: 2564 - RNA, 25 nt, Artificial Sequence
  Synthetic Oligonucleotide
caugauaaaagcaguuagaggugac

SEQ ID NO: 2565 - RNA, 25 nt, Artificial Sequence
  Synthetic Oligonucleotide
caagaggauugcaugauaaaagcag

SEQ ID NO: 2566 - RNA, 25 nt, Artificial Sequence
  Synthetic Oligonucleotide
aagaggauugcaugauaaaagcagu

SEQ ID NO: 2567 - RNA, 25 nt, Artificial Sequence
  Synthetic Oligonucleotide
acaagaggauugcaugauaaaagca

SEQ ID NO: 2568 - RNA, 25 nt, Artificial Sequence
  Synthetic Oligonucleotide
agaggauugcaugauaaaagcaguu

SEQ ID NO: 2569 - RNA, 25 nt, Artificial Sequence
  Synthetic Oligonucleotide
ugaagaucuguuccaccauugaaga

SEQ ID NO: 2570 - RNA, 25 nt, Artificial Sequence
  Synthetic Oligonucleotide
caugaagaucuguuccaccauugaa

SEQ ID NO: 2571 - RNA, 25 nt, Artificial Sequence
  Synthetic Oligonucleotide
aucaugaagaucuguuccaccauug

SEQ ID NO: 2572 - RNA, 25 nt, Artificial Sequence
  Synthetic Oligonucleotide
ucaugaagaucuguuccaccauuga

SEQ ID NO: 2573 - RNA, 25 nt, Artificial Sequence
  Synthetic Oligonucleotide
augaagaucuguuccaccauugaag

SEQ ID NO: 2574 - RNA, 25 nt, Artificial Sequence
  Synthetic Oligonucleotide
gaucaugaagaucuguuccaccauu

SEQ ID NO: 2575 - RNA, 25 nt, Artificial Sequence
  Synthetic Oligonucleotide
agaucaugaagaucuguuccaccau

SEQ ID NO: 2576 - RNA, 25 nt, Artificial Sequence
  Synthetic Oligonucleotide
gagaucaugaagaucuguuccacca

SEQ ID NO: 2577 - RNA, 25 nt, Artificial Sequence
  Synthetic Oligonucleotide
ugaugaugggcauguucaacaugcu

SEQ ID NO: 2578 - RNA, 25 nt, Artificial Sequence
  Synthetic Oligonucleotide
augaugaugggcauguucaacaugc

SEQ ID NO: 2579 - RNA, 25 nt, Artificial Sequence
  Synthetic Oligonucleotide
uggaggccauggugucuagggcccg

SEQ ID NO: 2580 - RNA, 25 nt, Artificial Sequence
  Synthetic Oligonucleotide
gaauucuugaggaugaacagaugua

SEQ ID NO: 2581 - RNA, 25 nt, Artificial Sequence
  Synthetic Oligonucleotide
ggaauucuugaggaugaacagaugu

SEQ ID NO: 2582 - RNA, 25 nt, Artificial Sequence
  Synthetic Oligonucleotide
aucaugagggaauacaagcaggagu

SEQ ID NO: 2583 - RNA, 25 nt, Artificial Sequence
  Synthetic Oligonucleotide
augguggaggccauggugucuaggg

SEQ ID NO: 2584 - RNA, 25 nt, Artificial Sequence
  Synthetic Oligonucleotide
ugguggaggccauggugucuagggc

SEQ ID NO: 2585 - RNA, 25 nt, Artificial Sequence
  Synthetic Oligonucleotide
agcaugguggaggccauggugucua

SEQ ID NO: 2586 - RNA, 25 nt, Artificial Sequence
  Synthetic Oligonucleotide
gcaugguggaggccauggugucuag

SEQ ID NO: 2587 - RNA, 25 nt, Artificial Sequence
  Synthetic Oligonucleotide
caugguggaggccauggugucuagg

SEQ ID NO: 2588 - RNA, 25 nt, Artificial Sequence
  Synthetic Oligonucleotide
aaauggucacacaaagaacaauagg

SEQ ID NO: 2589 - RNA, 25 nt, Artificial Sequence
  Synthetic Oligonucleotide
aaaauggucacacaaagaacaauag

SEQ ID NO: 2590 - RNA, 25 nt, Artificial Sequence
  Synthetic Oligonucleotide
gacaacaugaccaagaaaaugguca

SEQ ID NO: 2591 - RNA, 25 nt, Artificial Sequence
  Synthetic Oligonucleotide
acaacaugaccaagaaaauggucac

SEQ ID NO: 2592 - RNA, 25 nt, Artificial Sequence
  Synthetic Oligonucleotide
acaugaccaagaaaauggucacaca

SEQ ID NO: 2593 - RNA, 25 nt, Artificial Sequence
  Synthetic Oligonucleotide
caugaccaagaaaauggucacacaa

SEQ ID NO: 2594 - RNA, 25 nt, Artificial Sequence
  Synthetic Oligonucleotide
aacaugaccaagaaaauggucacac

SEQ ID NO: 2595 - RNA, 25 nt, Artificial Sequence
  Synthetic Oligonucleotide
gguggaggccauggugucuagggcc

SEQ ID NO: 2596 - RNA, 25 nt, Artificial Sequence
  Synthetic Oligonucleotide
ucaugagggaauacaagcaggagug

SEQ ID NO: 2597 - RNA, 25 nt, Artificial Sequence
  Synthetic Oligonucleotide
gagggaauacaagcaggaguggaua

SEQ ID NO: 2598 - RNA, 25 nt, Artificial Sequence
  Synthetic Oligonucleotide
guggaggccauggugucuagggccc

SEQ ID NO: 2599 - RNA, 25 nt, Artificial Sequence
  Synthetic Oligonucleotide
agggaauacaagcaggaguggauag

SEQ ID NO: 2600 - RNA, 25 nt, Artificial Sequence
  Synthetic Oligonucleotide
ugagggaauacaagcaggaguggau

SEQ ID NO: 2601 - RNA, 25 nt, Artificial Sequence
  Synthetic Oligonucleotide
caugagggaauacaagcaggagugg

SEQ ID NO: 2602 - RNA, 25 nt, Artificial Sequence
  Synthetic Oligonucleotide
aaucaugagggaauacaagcaggag

SEQ ID NO: 2603 - RNA, 25 nt, Artificial Sequence
  Synthetic Oligonucleotide
augagggaauacaagcaggagugga

SEQ ID NO: 2604 - RNA, 25 nt, Artificial Sequence
  Synthetic Oligonucleotide
caacaugaccaagaaaauggucaca

SEQ ID NO: 2605 - RNA, 25 nt, Artificial Sequence
  Synthetic Oligonucleotide
ugagaucaugaagaucuguuccacc

SEQ ID NO: 2606 - RNA, 25 nt, Artificial Sequence
  Synthetic Oligonucleotide
cugagaucaugaagaucuguuccac

SEQ ID NO: 2607 - RNA, 25 nt, Artificial Sequence
  Synthetic Oligonucleotide
ugaccaagaaaauggucacacaaag

SEQ ID NO: 2608 - RNA, 25 nt, Artificial Sequence
  Synthetic Oligonucleotide
gaaaauggucacacaaagaacaaua

SEQ ID NO: 2609 - RNA, 25 nt, Artificial Sequence
  Synthetic Oligonucleotide
agaaaauggucacacaaagaacaau

SEQ ID NO: 2610 - RNA, 25 nt, Artificial Sequence
  Synthetic Oligonucleotide
aagaaaauggucacacaaagaacaa

SEQ ID NO: 2611 - RNA, 25 nt, Artificial Sequence
  Synthetic Oligonucleotide
augaccaagaaaauggucacacaaa

SEQ ID NO: 2612 - RNA, 25 nt, Artificial Sequence
  Synthetic Oligonucleotide
caagaaaauggucacacaaagaaca

SEQ ID NO: 2613 - RNA, 25 nt, Artificial Sequence
  Synthetic Oligonucleotide
ccaagaaaauggucacacaaagaac

SEQ ID NO: 2614 - RNA, 25 nt, Artificial Sequence
  Synthetic Oligonucleotide
accaagaaaauggucacacaaagaa

SEQ ID NO: 2615 - RNA, 25 nt, Artificial Sequence
  Synthetic Oligonucleotide
gaccaagaaaauggucacacaaaga

SEQ ID NO: 2616 - RNA, 25 nt, Artificial Sequence
  Synthetic Oligonucleotide
ggggaauucuugaggaugaacagau

SEQ ID NO: 2617 - RNA, 25 nt, Artificial Sequence
  Synthetic Oligonucleotide
aggggaauucuugaggaugaacaga

SEQ ID NO: 2618 - RNA, 25 nt, Artificial Sequence
  Synthetic Oligonucleotide
gggaauucuugaggaugaacagaug

SEQ ID NO: 2619 - RNA, 25 nt, Artificial Sequence
  Synthetic Oligonucleotide
aaaggggaauucuugaggaugaaca

SEQ ID NO: 2620 - RNA, 25 nt, Artificial Sequence
  Synthetic Oligonucleotide
caaaggggaauucuugaggaugaac

SEQ ID NO: 2621 - RNA, 25 nt, Artificial Sequence
  Synthetic Oligonucleotide
ggcuaauagauuuccucaaggaugu

SEQ ID NO: 2622 - RNA, 25 nt, Artificial Sequence
  Synthetic Oligonucleotide
uaauagauuuccucaaggaugugau

SEQ ID NO: 2623 - RNA, 25 nt, Artificial Sequence
  Synthetic Oligonucleotide
aaggggaauucuugaggaugaacag

SEQ ID NO: 2624 - RNA, 25 nt, Artificial Sequence
  Synthetic Oligonucleotide
cuaauagauuuccucaaggauguga

SEQ ID NO: 2625 - RNA, 25 nt, Artificial Sequence
  Synthetic Oligonucleotide
gcuaauagauuuccucaaggaugug

SEQ ID NO: 2626 - RNA, 25 nt, Artificial Sequence
  Synthetic Oligonucleotide
uucuugaggaugaacagauguacca

SEQ ID NO: 2627 - RNA, 25 nt, Artificial Sequence
  Synthetic Oligonucleotide
auucuugaggaugaacagauguacc

SEQ ID NO: 2628 - RNA, 25 nt, Artificial Sequence
  Synthetic Oligonucleotide
auagauuuccucaaggaugugaugg

SEQ ID NO: 2629 - RNA, 25 nt, Artificial Sequence
  Synthetic Oligonucleotide
ugauggaccacuaccugaggauaau

SEQ ID NO: 2630 - RNA, 25 nt, Artificial Sequence
  Synthetic Oligonucleotide
gauggaccacuaccugaggauaaug

SEQ ID NO: 2631 - RNA, 25 nt, Artificial Sequence
  Synthetic Oligonucleotide
uagauuuccucaaggaugugaugga

SEQ ID NO: 2632 - RNA, 25 nt, Artificial Sequence
  Synthetic Oligonucleotide
auggaccacuaccugaggauaauga

SEQ ID NO: 2633 - RNA, 25 nt, Artificial Sequence
  Synthetic Oligonucleotide
uugauggaccacuaccugaggauaa

SEQ ID NO: 2634 - RNA, 25 nt, Artificial Sequence
  Synthetic Oligonucleotide
aauagauuuccucaaggaugugaug

SEQ ID NO: 2635 - RNA, 25 nt, Artificial Sequence
  Synthetic Oligonucleotide
auugauggaccacuaccugaggaua

SEQ ID NO: 2636 - RNA, 25 nt, Artificial Sequence
  Synthetic Oligonucleotide
uacaccauggacacagucaacagaa

SEQ ID NO: 2637 - RNA, 25 nt, Artificial Sequence
  Synthetic Oligonucleotide
acaccauggacacagucaacagaac

SEQ ID NO: 2638 - RNA, 25 nt, Artificial Sequence
  Synthetic Oligonucleotide
auccuccauacagccauggaacagg

SEQ ID NO: 2639 - RNA, 25 nt, Artificial Sequence
  Synthetic Oligonucleotide
gauccuccauacagccauggaacag

SEQ ID NO: 2640 - RNA, 25 nt, Artificial Sequence
  Synthetic Oligonucleotide
ugaugggcauguucaacaugcuaag

SEQ ID NO: 2641 - RNA, 25 nt, Artificial Sequence
  Synthetic Oligonucleotide
cuggagauccuccauacagccaugg

SEQ ID NO: 2642 - RNA, 25 nt, Artificial Sequence
  Synthetic Oligonucleotide
acuggagauccuccauacagccaug

SEQ ID NO: 2643 - RNA, 25 nt, Artificial Sequence
  Synthetic Oligonucleotide
augaugggcauguucaacaugcuaa

SEQ ID NO: 2644 - RNA, 25 nt, Artificial Sequence
  Synthetic Oligonucleotide
gaugaugggcauguucaacaugcua

SEQ ID NO: 2645 - RNA, 25 nt, Artificial Sequence
  Synthetic Oligonucleotide
aauucuugaggaugaacagauguac

SEQ ID NO: 2646 - RNA, 25 nt, Artificial Sequence
  Synthetic Oligonucleotide
ugggcauguucaacaugcuaaguac

SEQ ID NO: 2647 - RNA, 25 nt, Artificial Sequence
  Synthetic Oligonucleotide
augggcauguucaacaugcuaagua

SEQ ID NO: 2648 - RNA, 25 nt, Artificial Sequence
  Synthetic Oligonucleotide
gaugggcauguucaacaugcuaagu

SEQ ID NO: 2649 - RNA, 25 nt, Artificial Sequence
  Synthetic Oligonucleotide
caaaucaugagggaauacaagcagg

SEQ ID NO: 2650 - RNA, 25 nt, Artificial Sequence
  Synthetic Oligonucleotide
augcaccaaaucaugagggaauaca

SEQ ID NO: 2651 - RNA, 25 nt, Artificial Sequence
  Synthetic Oligonucleotide
aaugcaccaaaucaugagggaauac

SEQ ID NO: 2652 - RNA, 25 nt, Artificial Sequence
  Synthetic Oligonucleotide
ucauagugaaugcaccaaaucauga

SEQ ID NO: 2653 - RNA, 25 nt, Artificial Sequence
  Synthetic Oligonucleotide
gagauccuccauacagccauggaac

SEQ ID NO: 2654 - RNA, 25 nt, Artificial Sequence
  Synthetic Oligonucleotide
cucauagugaaugcaccaaaucaug

SEQ ID NO: 2655 - RNA, 25 nt, Artificial Sequence
  Synthetic Oligonucleotide
ugcaccaaaucaugagggaauacaa

SEQ ID NO: 2656 - RNA, 25 nt, Artificial Sequence
  Synthetic Oligonucleotide
ggagauccuccauacagccauggaa

SEQ ID NO: 2657 - RNA, 25 nt, Artificial Sequence
  Synthetic Oligonucleotide
agauccuccauacagccauggaaca

SEQ ID NO: 2658 - RNA, 25 nt, Artificial Sequence
  Synthetic Oligonucleotide
uggagauccuccauacagccaugga

SEQ ID NO: 2659 - RNA, 25 nt, Artificial Sequence
  Synthetic Oligonucleotide
uaaagaacaacaugauaaacaauga

SEQ ID NO: 2660 - RNA, 25 nt, Artificial Sequence
  Synthetic Oligonucleotide
gcaccaaaucaugagggaauacaag

SEQ ID NO: 2661 - RNA, 25 nt, Artificial Sequence
  Synthetic Oligonucleotide
caccaaaucaugagggaauacaagc

SEQ ID NO: 2662 - RNA, 25 nt, Artificial Sequence
  Synthetic Oligonucleotide
auaaagaacaacaugauaaacaaug

SEQ ID NO: 2663 - RNA, 25 nt, Artificial Sequence
  Synthetic Oligonucleotide
cagugauaaagaacaacaugauaaa

SEQ ID NO: 2664 - RNA, 25 nt, Artificial Sequence
  Synthetic Oligonucleotide
ugauaaagaacaacaugauaaacaa

SEQ ID NO: 2665 - RNA, 25 nt, Artificial Sequence
  Synthetic Oligonucleotide
ccaaaucaugagggaauacaagcag

SEQ ID NO: 2666 - RNA, 25 nt, Artificial Sequence
  Synthetic Oligonucleotide
gugauaaagaacaacaugauaaaca

SEQ ID NO: 2667 - RNA, 25 nt, Artificial Sequence
  Synthetic Oligonucleotide
accaaaucaugagggaauacaagca

SEQ ID NO: 2668 - RNA, 25 nt, Artificial Sequence
  Synthetic Oligonucleotide
aaggaugugauggaaucaauggaua

SEQ ID NO: 2669 - RNA, 25 nt, Artificial Sequence
  Synthetic Oligonucleotide
ccauggacacagucaacagaacaca

SEQ ID NO: 2670 - RNA, 25 nt, Artificial Sequence
  Synthetic Oligonucleotide
accauggacacagucaacagaacac

SEQ ID NO: 2671 - RNA, 25 nt, Artificial Sequence
  Synthetic Oligonucleotide
acagugauaaagaacaacaugauaa

SEQ ID NO: 2672 - RNA, 25 nt, Artificial Sequence
  Synthetic Oligonucleotide
auagugaaugcaccaaaucaugagg

SEQ ID NO: 2673 - RNA, 25 nt, Artificial Sequence
  Synthetic Oligonucleotide
caccauggacacagucaacagaaca

SEQ ID NO: 2674 - RNA, 25 nt, Artificial Sequence
  Synthetic Oligonucleotide
uagugaaugcaccaaaucaugaggg

SEQ ID NO: 2675 - RNA, 25 nt, Artificial Sequence
  Synthetic Oligonucleotide
agugauaaagaacaacaugauaaac

SEQ ID NO: 2676 - RNA, 25 nt, Artificial Sequence
  Synthetic Oligonucleotide
gauaaagaacaacaugauaaacaau

SEQ ID NO: 2677 - RNA, 25 nt, Artificial Sequence
  Synthetic Oligonucleotide
uaacagugauaaagaacaacaugau

SEQ ID NO: 2678 - RNA, 25 nt, Artificial Sequence
  Synthetic Oligonucleotide
aggaugugauggaaucaauggauaa

SEQ ID NO: 2679 - RNA, 25 nt, Artificial Sequence
  Synthetic Oligonucleotide
cauagugaaugcaccaaaucaugag

SEQ ID NO: 2680 - RNA, 25 nt, Artificial Sequence
  Synthetic Oligonucleotide
aacagugauaaagaacaacaugaua

SEQ ID NO: 2681 - RNA, 25 nt, Artificial Sequence
  Synthetic Oligonucleotide
ggaccacuaccugaggauaaugagc

SEQ ID NO: 2682 - RNA, 25 nt, Artificial Sequence
  Synthetic Oligonucleotide
gaccacuaccugaggauaaugagcc

SEQ ID NO: 2683 - RNA, 25 nt, Artificial Sequence
  Synthetic Oligonucleotide
ggaauacaagcaggaguggauagau

SEQ ID NO: 2684 - RNA, 25 nt, Artificial Sequence
  Synthetic Oligonucleotide
gaauacaagcaggaguggauagauu

SEQ ID NO: 2685 - RNA, 25 nt, Artificial Sequence
  Synthetic Oligonucleotide
guaacagugauaaagaacaacauga

SEQ ID NO: 2686 - RNA, 25 nt, Artificial Sequence
  Synthetic Oligonucleotide
uacaagcaggaguggauagauucua

SEQ ID NO: 2687 - RNA, 25 nt, Artificial Sequence
  Synthetic Oligonucleotide
gccauggugucuagggcccggauug

SEQ ID NO: 2688 - RNA, 25 nt, Artificial Sequence
  Synthetic Oligonucleotide
ccauggugucuagggcccggauuga

SEQ ID NO: 2689 - RNA, 25 nt, Artificial Sequence
  Synthetic Oligonucleotide
auacaagcaggaguggauagauucu

SEQ ID NO: 2690 - RNA, 25 nt, Artificial Sequence
  Synthetic Oligonucleotide
gaggccauggugucuagggcccgga

SEQ ID NO: 2691 - RNA, 25 nt, Artificial Sequence
  Synthetic Oligonucleotide
aggccauggugucuagggcccggau

SEQ ID NO: 2692 - RNA, 25 nt, Artificial Sequence
  Synthetic Oligonucleotide
uggaccacuaccugaggauaaugag

SEQ ID NO: 2693 - RNA, 25 nt, Artificial Sequence
  Synthetic Oligonucleotide
aaaucaugagggaauacaagcagga

SEQ ID NO: 2694 - RNA, 25 nt, Artificial Sequence
  Synthetic Oligonucleotide
uugcaacuacacacuccuggauucc

SEQ ID NO: 2695 - RNA, 25 nt, Artificial Sequence
  Synthetic Oligonucleotide
guugcaacuacacacuccuggauuc

SEQ ID NO: 2696 - RNA, 25 nt, Artificial Sequence
  Synthetic Oligonucleotide
ggccauggugucuagggcccggauu

SEQ ID NO: 2697 - RNA, 25 nt, Artificial Sequence
  Synthetic Oligonucleotide
gggaauacaagcaggaguggauaga

SEQ ID NO: 2698 - RNA, 25 nt, Artificial Sequence
  Synthetic Oligonucleotide
ggaggccauggugucuagggcccgg

SEQ ID NO: 2699 - RNA, 25 nt, Artificial Sequence
  Synthetic Oligonucleotide
agugaaugcaccaaaucaugaggga

SEQ ID NO: 2700 - RNA, 25 nt, Artificial Sequence
  Synthetic Oligonucleotide
ugaaugcaccaaaucaugagggaau

SEQ ID NO: 2701 - RNA, 25 nt, Artificial Sequence
  Synthetic Oligonucleotide
gucaacagaacacaccaauauucag

SEQ ID NO: 2702 - RNA, 25 nt, Artificial Sequence
  Synthetic Oligonucleotide
gaaugcaccaaaucaugagggaaua

SEQ ID NO: 2703 - RNA, 25 nt, Artificial Sequence
  Synthetic Oligonucleotide
uuuccucaaggaugugauggaauca

SEQ ID NO: 2704 - RNA, 25 nt, Artificial Sequence
  Synthetic Oligonucleotide
auuuccucaaggaugugauggaauc

SEQ ID NO: 2705 - RNA, 25 nt, Artificial Sequence
  Synthetic Oligonucleotide
ucaacagaacacaccaauauucaga

SEQ ID NO: 2706 - RNA, 25 nt, Artificial Sequence
  Synthetic Oligonucleotide
uuccucaaggaugugauggaaucaa

SEQ ID NO: 2707 - RNA, 25 nt, Artificial Sequence
  Synthetic Oligonucleotide
gugaaugcaccaaaucaugagggaa

SEQ ID NO: 2708 - RNA, 25 nt, Artificial Sequence
  Synthetic Oligonucleotide
uccucaaggaugugauggaaucaau

SEQ ID NO: 2709 - RNA, 25 nt, Artificial Sequence
  Synthetic Oligonucleotide
auggugucuagggcccggauugaug

SEQ ID NO: 2710 - RNA, 25 nt, Artificial Sequence
  Synthetic Oligonucleotide
gauuuccucaaggaugugauggaau

SEQ ID NO: 2711 - RNA, 25 nt, Artificial Sequence
  Synthetic Oligonucleotide
cauggugucuagggcccggauugau

SEQ ID NO: 2712 - RNA, 25 nt, Artificial Sequence
  Synthetic Oligonucleotide
agccaaaggggaauucuugaggaug

SEQ ID NO: 2713 - RNA, 25 nt, Artificial Sequence
  Synthetic Oligonucleotide
uggugucuagggcccggauugaugc

SEQ ID NO: 2714 - RNA, 25 nt, Artificial Sequence
  Synthetic Oligonucleotide
gccaaaggggaauucuugaggauga

SEQ ID NO: 2715 - RNA, 25 nt, Artificial Sequence
  Synthetic Oligonucleotide
aaagaacaacaugauaaacaaugac

SEQ ID NO: 2716 - RNA, 25 nt, Artificial Sequence
  Synthetic Oligonucleotide
agaacaacaugauaaacaaugaccu

SEQ ID NO: 2717 - RNA, 25 nt, Artificial Sequence
  Synthetic Oligonucleotide
aagaacaacaugauaaacaaugacc

SEQ ID NO: 2718 - RNA, 25 nt, Artificial Sequence
  Synthetic Oligonucleotide
acaagcaggaguggauagauucuac

SEQ ID NO: 2719 - RNA, 25 nt, Artificial Sequence
  Synthetic Oligonucleotide
ccaaaggggaauucuugaggaugaa

SEQ ID NO: 2720 - RNA, 25 nt, Artificial Sequence
  Synthetic Oligonucleotide
gaguaacagugauaaagaacaacau

SEQ ID NO: 2721 - RNA, 25 nt, Artificial Sequence
  Synthetic Oligonucleotide
ggaguaacagugauaaagaacaaca

SEQ ID NO: 2722 - RNA, 25 nt, Artificial Sequence
  Synthetic Oligonucleotide
aguaacagugauaaagaacaacaug

SEQ ID NO: 2723 - RNA, 25 nt, Artificial Sequence
  Synthetic Oligonucleotide
cugauaugagcauuggaguaacagu

SEQ ID NO: 2724 - RNA, 25 nt, Artificial Sequence
  Synthetic Oligonucleotide
gcugauaugagcauuggaguaacag

SEQ ID NO: 2725 - RNA, 25 nt, Artificial Sequence
  Synthetic Oligonucleotide
acaacaugauaaacaaugaccuugg

SEQ ID NO: 2726 - RNA, 25 nt, Artificial Sequence
  Synthetic Oligonucleotide
aagcaggaguggauagauucuacag

SEQ ID NO: 2727 - RNA, 25 nt, Artificial Sequence
  Synthetic Oligonucleotide
aacaacaugauaaacaaugaccuug

SEQ ID NO: 2728 - RNA, 25 nt, Artificial Sequence
  Synthetic Oligonucleotide
augagcauuggaguaacagugauaa

SEQ ID NO: 2729 - RNA, 25 nt, Artificial Sequence
  Synthetic Oligonucleotide
caagcaggaguggauagauucuaca

SEQ ID NO: 2730 - RNA, 25 nt, Artificial Sequence
  Synthetic Oligonucleotide
ugagcauuggaguaacagugauaaa

SEQ ID NO: 2731 - RNA, 25 nt, Artificial Sequence
  Synthetic Oligonucleotide
cagcugauaugagcauuggaguaac

SEQ ID NO: 2732 - RNA, 25 nt, Artificial Sequence
  Synthetic Oligonucleotide
ucagcugauaugagcauuggaguaa

SEQ ID NO: 2733 - RNA, 25 nt, Artificial Sequence
  Synthetic Oligonucleotide
agauuuccucaaggaugugauggaa

SEQ ID NO: 2734 - RNA, 25 nt, Artificial Sequence
  Synthetic Oligonucleotide
ccucaaggaugugauggaaucaaug

SEQ ID NO: 2735 - RNA, 25 nt, Artificial Sequence
  Synthetic Oligonucleotide
aauacaagcaggaguggauagauuc

SEQ ID NO: 2736 - RNA, 25 nt, Artificial Sequence
  Synthetic Oligonucleotide
uggaguaacagugauaaagaacaac

SEQ ID NO: 2737 - RNA, 25 nt, Artificial Sequence
  Synthetic Oligonucleotide
auuggaguaacagugauaaagaaca

SEQ ID NO: 2738 - RNA, 25 nt, Artificial Sequence
  Synthetic Oligonucleotide
uuggaccagcaacagcccagauggc

SEQ ID NO: 2739 - RNA, 25 nt, Artificial Sequence
  Synthetic Oligonucleotide
uuggaguaacagugauaaagaacaa

SEQ ID NO: 2740 - RNA, 25 nt, Artificial Sequence
  Synthetic Oligonucleotide
cuuggaccagcaacagcccagaugg

SEQ ID NO: 2741 - RNA, 25 nt, Artificial Sequence
  Synthetic Oligonucleotide
cccggauugaugccagaauugacuu

SEQ ID NO: 2742 - RNA, 25 nt, Artificial Sequence
  Synthetic Oligonucleotide
agcugauaugagcauuggaguaaca

SEQ ID NO: 2743 - RNA, 25 nt, Artificial Sequence
  Synthetic Oligonucleotide
gauaugagcauuggaguaacaguga

SEQ ID NO: 2744 - RNA, 25 nt, Artificial Sequence
  Synthetic Oligonucleotide
auaugagcauuggaguaacagugau

SEQ ID NO: 2745 - RNA, 25 nt, Artificial Sequence
  Synthetic Oligonucleotide
uaugagcauuggaguaacagugaua

SEQ ID NO: 2746 - RNA, 25 nt, Artificial Sequence
  Synthetic Oligonucleotide
ugauaugagcauuggaguaacagug

SEQ ID NO: 2747 - RNA, 25 nt, Artificial Sequence
  Synthetic Oligonucleotide
gcccggauugaugccagaauugacu

SEQ ID NO: 2748 - RNA, 25 nt, Artificial Sequence
  Synthetic Oligonucleotide
ucuagggcccggauugaugccagaa

SEQ ID NO: 2749 - RNA, 25 nt, Artificial Sequence
  Synthetic Oligonucleotide
cuagggcccggauugaugccagaau

SEQ ID NO: 2750 - RNA, 25 nt, Artificial Sequence
  Synthetic Oligonucleotide
ccggauugaugccagaauugacuuc

SEQ ID NO: 2751 - RNA, 25 nt, Artificial Sequence
  Synthetic Oligonucleotide
ggauugaugccagaauugacuucga

SEQ ID NO: 2752 - RNA, 25 nt, Artificial Sequence
  Synthetic Oligonucleotide
agcauuggaguaacagugauaaaga

SEQ ID NO: 2753 - RNA, 25 nt, Artificial Sequence
  Synthetic Oligonucleotide
cggauugaugccagaauugacuucg

SEQ ID NO: 2754 - RNA, 25 nt, Artificial Sequence
  Synthetic Oligonucleotide
cucaaggaugugauggaaucaaugg

SEQ ID NO: 2755 - RNA, 25 nt, Artificial Sequence
  Synthetic Oligonucleotide
agggcccggauugaugccagaauug

SEQ ID NO: 2756 - RNA, 25 nt, Artificial Sequence
  Synthetic Oligonucleotide
gggcccggauugaugccagaauuga

SEQ ID NO: 2757 - RNA, 25 nt, Artificial Sequence
  Synthetic Oligonucleotide
ucaaggaugugauggaaucaaugga

SEQ ID NO: 2758 - RNA, 25 nt, Artificial Sequence
  Synthetic Oligonucleotide
uagggcccggauugaugccagaauu

SEQ ID NO: 2759 - RNA, 25 nt, Artificial Sequence
  Synthetic Oligonucleotide
gaacaacaugauaaacaaugaccuu

SEQ ID NO: 2760 - RNA, 25 nt, Artificial Sequence
  Synthetic Oligonucleotide
gcauuggaguaacagugauaaagaa

SEQ ID NO: 2761 - RNA, 25 nt, Artificial Sequence
  Synthetic Oligonucleotide
ggcccggauugaugccagaauugac

SEQ ID NO: 2762 - RNA, 25 nt, Artificial Sequence
  Synthetic Oligonucleotide
uugaugccagaauugacuucgaguc

SEQ ID NO: 2763 - RNA, 25 nt, Artificial Sequence
  Synthetic Oligonucleotide
gagcauuggaguaacagugauaaag

SEQ ID NO: 2764 - RNA, 25 nt, Artificial Sequence
  Synthetic Oligonucleotide
auugaugccagaauugacuucgagu

SEQ ID NO: 2765 - RNA, 25 nt, Artificial Sequence
  Synthetic Oligonucleotide
ugucuagggcccggauugaugccag

SEQ ID NO: 2766 - RNA, 25 nt, Artificial Sequence
  Synthetic Oligonucleotide
gaugccagaauugacuucgagucug

SEQ ID NO: 2767 - RNA, 25 nt, Artificial Sequence
  Synthetic Oligonucleotide
augccagaauugacuucgagucugg

SEQ ID NO: 2768 - RNA, 25 nt, Artificial Sequence
  Synthetic Oligonucleotide
cauuggaguaacagugauaaagaac

SEQ ID NO: 2769 - RNA, 25 nt, Artificial Sequence
  Synthetic Oligonucleotide
ugaugccagaauugacuucgagucu

SEQ ID NO: 2770 - RNA, 25 nt, Artificial Sequence
  Synthetic Oligonucleotide
gucuagggcccggauugaugccaga

SEQ ID NO: 2771 - RNA, 25 nt, Artificial Sequence
  Synthetic Oligonucleotide
ggugucuagggcccggauugaugcc

SEQ ID NO: 2772 - RNA, 25 nt, Artificial Sequence
  Synthetic Oligonucleotide
gugucuagggcccggauugaugcca

SEQ ID NO: 2773 - RNA, 25 nt, Artificial Sequence
  Synthetic Oligonucleotide
caaggaugugauggaaucaauggau

SEQ ID NO: 2774 - RNA, 25 nt, Artificial Sequence
  Synthetic Oligonucleotide
cauacagccauggaacaggaacagg

SEQ ID NO: 2775 - RNA, 25 nt, Artificial Sequence
  Synthetic Oligonucleotide
ccauacagccauggaacaggaacag

SEQ ID NO: 2776 - RNA, 25 nt, Artificial Sequence
  Synthetic Oligonucleotide
gcaacuacacacuccuggauuccca

SEQ ID NO: 2777 - RNA, 25 nt, Artificial Sequence
  Synthetic Oligonucleotide
ugcaacuacacacuccuggauuccc

SEQ ID NO: 2778 - RNA, 25 nt, Artificial Sequence
  Synthetic Oligonucleotide
aacuacacacuccuggauucccaag

SEQ ID NO: 2779 - RNA, 25 nt, Artificial Sequence
  Synthetic Oligonucleotide
acuacacacuccuggauucccaaga

SEQ ID NO: 2780 - RNA, 25 nt, Artificial Sequence
  Synthetic Oligonucleotide
cuacacacuccuggauucccaagag

SEQ ID NO: 2781 - RNA, 25 nt, Artificial Sequence
  Synthetic Oligonucleotide
caacuacacacuccuggauucccaa

SEQ ID NO: 2782 - RNA, 25 nt, Artificial Sequence
  Synthetic Oligonucleotide
uauaugaagcaauugaggagugccu

SEQ ID NO: 2783 - RNA, 25 nt, Artificial Sequence
  Synthetic Oligonucleotide
gaagcaauugaggagugccugauua

SEQ ID NO: 2784 - RNA, 25 nt, Artificial Sequence
  Synthetic Oligonucleotide
aagcaauugaggagugccugauuaa

SEQ ID NO: 2785 - RNA, 25 nt, Artificial Sequence
  Synthetic Oligonucleotide
ugaagcaauugaggagugccugauu

SEQ ID NO: 2786 - RNA, 25 nt, Artificial Sequence
  Synthetic Oligonucleotide
uaugaagcaauugaggagugccuga

SEQ ID NO: 2787 - RNA, 25 nt, Artificial Sequence
  Synthetic Oligonucleotide
augaagcaauugaggagugccugau

SEQ ID NO: 2788 - RNA, 25 nt, Artificial Sequence
  Synthetic Oligonucleotide
cuauaugaagcaauugaggagugcc

SEQ ID NO: 2789 - RNA, 25 nt, Artificial Sequence
  Synthetic Oligonucleotide
auaugaagcaauugaggagugccug

SEQ ID NO: 2790 - RNA, 25 nt, Artificial Sequence
  Synthetic Oligonucleotide
gcuauaugaagcaauugaggagugc

SEQ ID NO: 2791 - RNA, 25 nt, Artificial Sequence
  Synthetic Oligonucleotide
gggcuauaugaagcaauugaggagu

SEQ ID NO: 2792 - RNA, 25 nt, Artificial Sequence
  Synthetic Oligonucleotide
ggcuauaugaagcaauugaggagug

SEQ ID NO: 2793 - RNA, 25 nt, Artificial Sequence
  Synthetic Oligonucleotide
auugagggcaagcuuucucaaaugu

SEQ ID NO: 2794 - RNA, 25 nt, Artificial Sequence
  Synthetic Oligonucleotide
cauugagggcaagcuuucucaaaug

SEQ ID NO: 2795 - RNA, 25 nt, Artificial Sequence
  Synthetic Oligonucleotide
uugagggcaagcuuucucaaauguc

SEQ ID NO: 2796 - RNA, 25 nt, Artificial Sequence
  Synthetic Oligonucleotide
gccugauuaaugaucccuggguuuu

SEQ ID NO: 2797 - RNA, 25 nt, Artificial Sequence
  Synthetic Oligonucleotide
ugccugauuaaugaucccuggguuu

SEQ ID NO: 2798 - RNA, 25 nt, Artificial Sequence
  Synthetic Oligonucleotide
ccugauuaaugaucccuggguuuug

SEQ ID NO: 2799 - RNA, 25 nt, Artificial Sequence
  Synthetic Oligonucleotide
ugauuaaugaucccuggguuuugcu

SEQ ID NO: 2800 - RNA, 25 nt, Artificial Sequence
  Synthetic Oligonucleotide
cugauuaaugaucccuggguuuugc

SEQ ID NO: 2801 - RNA, 25 nt, Artificial Sequence
  Synthetic Oligonucleotide
gagugccugauuaaugaucccuggg

SEQ ID NO: 2802 - RNA, 25 nt, Artificial Sequence
  Synthetic Oligonucleotide
gaggagugccugauuaaugaucccu

SEQ ID NO: 2803 - RNA, 25 nt, Artificial Sequence
  Synthetic Oligonucleotide
aggagugccugauuaaugaucccug

SEQ ID NO: 2804 - RNA, 25 nt, Artificial Sequence
  Synthetic Oligonucleotide
ggagugccugauuaaugaucccugg

SEQ ID NO: 2805 - RNA, 25 nt, Artificial Sequence
  Synthetic Oligonucleotide
agugccugauuaaugaucccugggu

SEQ ID NO: 2806 - RNA, 25 nt, Artificial Sequence
  Synthetic Oligonucleotide
uugaggagugccugauuaaugaucc

SEQ ID NO: 2807 - RNA, 25 nt, Artificial Sequence
  Synthetic Oligonucleotide
gugccugauuaaugaucccuggguu

SEQ ID NO: 2808 - RNA, 25 nt, Artificial Sequence
  Synthetic Oligonucleotide
ugaggagugccugauuaaugauccc

SEQ ID NO: 2809 - RNA, 25 nt, Artificial Sequence
  Synthetic Oligonucleotide
caauugaggagugccugauuaauga

SEQ ID NO: 2810 - RNA, 25 nt, Artificial Sequence
  Synthetic Oligonucleotide
gcaauugaggagugccugauuaaug

SEQ ID NO: 2811 - RNA, 25 nt, Artificial Sequence
  Synthetic Oligonucleotide
agcaauugaggagugccugauuaau

SEQ ID NO: 2812 - RNA, 25 nt, Artificial Sequence
  Synthetic Oligonucleotide
aauugaggagugccugauuaaugau

SEQ ID NO: 2813 - RNA, 25 nt, Artificial Sequence
  Synthetic Oligonucleotide
auugaggagugccugauuaaugauc

SEQ ID NO: 2814 - RNA, 25 nt, Artificial Sequence
  Synthetic Oligonucleotide
aauuuuagagccuauguggauggau

SEQ ID NO: 2815 - RNA, 25 nt, Artificial Sequence
  Synthetic Oligonucleotide
auuuuagagccuauguggauggauu

SEQ ID NO: 2816 - RNA, 25 nt, Artificial Sequence
  Synthetic Oligonucleotide
agaauuuuagagccuauguggaugg

SEQ ID NO: 2817 - RNA, 25 nt, Artificial Sequence
  Synthetic Oligonucleotide
ugagaauuuuagagccuauguggau

SEQ ID NO: 2818 - RNA, 25 nt, Artificial Sequence
  Synthetic Oligonucleotide
uugagaauuuuagagccuaugugga

SEQ ID NO: 2819 - RNA, 25 nt, Artificial Sequence
  Synthetic Oligonucleotide
gagaauuuuagagccuauguggaug

SEQ ID NO: 2820 - RNA, 25 nt, Artificial Sequence
  Synthetic Oligonucleotide
acaaacaaauuugcagcaauaugca

SEQ ID NO: 2821 - RNA, 25 nt, Artificial Sequence
  Synthetic Oligonucleotide
aagauuuugugcgacaaugcuucaa

SEQ ID NO: 2822 - RNA, 25 nt, Artificial Sequence
  Synthetic Oligonucleotide
caaacaaauuugcagcaauaugcac

SEQ ID NO: 2823 - RNA, 25 nt, Artificial Sequence
  Synthetic Oligonucleotide
ucauguauucagauuuucauuucau

SEQ ID NO: 2824 - RNA, 25 nt, Artificial Sequence
  Synthetic Oligonucleotide
gaaacaaacaaauuugcagcaauau

SEQ ID NO: 2825 - RNA, 25 nt, Artificial Sequence
  Synthetic Oligonucleotide
uucauguauucagauuuucauuuca

SEQ ID NO: 2826 - RNA, 25 nt, Artificial Sequence
  Synthetic Oligonucleotide
gaauuuuagagccuauguggaugga

SEQ ID NO: 2827 - RNA, 25 nt, Artificial Sequence
  Synthetic Oligonucleotide
aaacaaacaaauuugcagcaauaug

SEQ ID NO: 2828 - RNA, 25 nt, Artificial Sequence
  Synthetic Oligonucleotide
aacaaacaaauuugcagcaauaugc

SEQ ID NO: 2829 - RNA, 25 nt, Artificial Sequence
  Synthetic Oligonucleotide
uguauucagauuuucauuucaucaa

SEQ ID NO: 2830 - RNA, 25 nt, Artificial Sequence
  Synthetic Oligonucleotide
auguauucagauuuucauuucauca

SEQ ID NO: 2831 - RNA, 25 nt, Artificial Sequence
  Synthetic Oligonucleotide
guauucagauuuucauuucaucaau

SEQ ID NO: 2832 - RNA, 25 nt, Artificial Sequence
  Synthetic Oligonucleotide
auucagauuuucauuucaucaauga

SEQ ID NO: 2833 - RNA, 25 nt, Artificial Sequence
  Synthetic Oligonucleotide
uauucagauuuucauuucaucaaug

SEQ ID NO: 2834 - RNA, 25 nt, Artificial Sequence
  Synthetic Oligonucleotide
cauguauucagauuuucauuucauc

SEQ ID NO: 2835 - RNA, 25 nt, Artificial Sequence
  Synthetic Oligonucleotide
gaagauuuugugcgacaaugcuuca

SEQ ID NO: 2836 - RNA, 25 nt, Artificial Sequence
  Synthetic Oligonucleotide
uggaagauuuugugcgacaaugcuu

SEQ ID NO: 2837 - RNA, 25 nt, Artificial Sequence
  Synthetic Oligonucleotide
auggaagauuuugugcgacaaugcu

SEQ ID NO: 2838 - RNA, 25 nt, Artificial Sequence
  Synthetic Oligonucleotide
ggaagauuuugugcgacaaugcuuc

SEQ ID NO: 2839 - RNA, 25 nt, Artificial Sequence
  Synthetic Oligonucleotide
uuuagagccuauguggauggauucg

SEQ ID NO: 2840 - RNA, 25 nt, Artificial Sequence
  Synthetic Oligonucleotide
uagagccuauguggauggauucgaa

SEQ ID NO: 2841 - RNA, 25 nt, Artificial Sequence
  Synthetic Oligonucleotide
uuagagccuauguggauggauucga

SEQ ID NO: 2842 - RNA, 25 nt, Artificial Sequence
  Synthetic Oligonucleotide
gagccuauguggauggauucgaacc

SEQ ID NO: 2843 - RNA, 25 nt, Artificial Sequence
  Synthetic Oligonucleotide
agagccuauguggauggauucgaac

SEQ ID NO: 2844 - RNA, 25 nt, Artificial Sequence
  Synthetic Oligonucleotide
aaaugaaauggggaauggagaugag

SEQ ID NO: 2845 - RNA, 25 nt, Artificial Sequence
  Synthetic Oligonucleotide
aaaaugaaauggggaauggagauga

SEQ ID NO: 2846 - RNA, 25 nt, Artificial Sequence
  Synthetic Oligonucleotide
ccuauguggauggauucgaaccgaa

SEQ ID NO: 2847 - RNA, 25 nt, Artificial Sequence
  Synthetic Oligonucleotide
uauguggauggauucgaaccgaacg

SEQ ID NO: 2848 - RNA, 25 nt, Artificial Sequence
  Synthetic Oligonucleotide
auguggauggauucgaaccgaacgg

SEQ ID NO: 2849 - RNA, 25 nt, Artificial Sequence
  Synthetic Oligonucleotide
cuauguggauggauucgaaccgaac

SEQ ID NO: 2850 - RNA, 25 nt, Artificial Sequence
  Synthetic Oligonucleotide
agccuauguggauggauucgaaccg

SEQ ID NO: 2851 - RNA, 25 nt, Artificial Sequence
  Synthetic Oligonucleotide
gccuauguggauggauucgaaccga

SEQ ID NO: 2852 - RNA, 25 nt, Artificial Sequence
  Synthetic Oligonucleotide
uguggauggauucgaaccgaacggc

SEQ ID NO: 2853 - RNA, 25 nt, Artificial Sequence
  Synthetic Oligonucleotide
guggauggauucgaaccgaacggcu

SEQ ID NO: 2854 - RNA, 25 nt, Artificial Sequence
  Synthetic Oligonucleotide
uaagcgauuugaagcaauaugauag

SEQ ID NO: 2855 - RNA, 25 nt, Artificial Sequence
  Synthetic Oligonucleotide
gcgauuugaagcaauaugauaguga

SEQ ID NO: 2856 - RNA, 25 nt, Artificial Sequence
  Synthetic Oligonucleotide
agcgauuugaagcaauaugauagug

SEQ ID NO: 2857 - RNA, 25 nt, Artificial Sequence
  Synthetic Oligonucleotide
aagcgauuugaagcaauaugauagu

SEQ ID NO: 2858 - RNA, 25 nt, Artificial Sequence
  Synthetic Oligonucleotide
agaggcgaagaaacaauugaagaaa

SEQ ID NO: 2859 - RNA, 25 nt, Artificial Sequence
  Synthetic Oligonucleotide
gagggcaagcuuucucaaaugucca

SEQ ID NO: 2860 - RNA, 25 nt, Artificial Sequence
  Synthetic Oligonucleotide
agggcaagcuuucucaaauguccaa

SEQ ID NO: 2861 - RNA, 25 nt, Artificial Sequence
  Synthetic Oligonucleotide
ugagggcaagcuuucucaaaugucc

SEQ ID NO: 2862 - RNA, 25 nt, Artificial Sequence
  Synthetic Oligonucleotide
gggcaagcuuucucaaauguccaaa

SEQ ID NO: 2863 - RNA, 25 nt, Artificial Sequence
  Synthetic Oligonucleotide
auaagcgauuugaagcaauaugaua

SEQ ID NO: 2864 - RNA, 25 nt, Artificial Sequence
  Synthetic Oligonucleotide
uaaugaaggggguauacauuaauac

SEQ ID NO: 2865 - RNA, 25 nt, Artificial Sequence
  Synthetic Oligonucleotide
auaaugaaggggguauacauuaaua

SEQ ID NO: 2866 - RNA, 25 nt, Artificial Sequence
  Synthetic Oligonucleotide
ggggcuauaugaagcaauugaggag

SEQ ID NO: 2867 - RNA, 25 nt, Artificial Sequence
  Synthetic Oligonucleotide
gauuugaagcaauaugauagugacg

SEQ ID NO: 2868 - RNA, 25 nt, Artificial Sequence
  Synthetic Oligonucleotide
auuugaagcaauaugauagugacga

SEQ ID NO: 2869 - RNA, 25 nt, Artificial Sequence
  Synthetic Oligonucleotide
cgauuugaagcaauaugauagugac

SEQ ID NO: 2870 - RNA, 25 nt, Artificial Sequence
  Synthetic Oligonucleotide
gggggcuauaugaagcaauugagga

SEQ ID NO: 2871 - RNA, 25 nt, Artificial Sequence
  Synthetic Oligonucleotide
ggggggcuauaugaagcaauugagg

SEQ ID NO: 2872 - RNA, 25 nt, Artificial Sequence
  Synthetic Oligonucleotide
ugaaggggguauacauuaauacugc

SEQ ID NO: 2873 - RNA, 25 nt, Artificial Sequence
  Synthetic Oligonucleotide
augaaggggguauacauuaauacug

SEQ ID NO: 2874 - RNA, 25 nt, Artificial Sequence
  Synthetic Oligonucleotide
aaugaaggggguauacauuaauacu

SEQ ID NO: 2875 - RNA, 25 nt, Artificial Sequence
  Synthetic Oligonucleotide
gcaauaugauagugacgaaccugaa

SEQ ID NO: 2876 - RNA, 25 nt, Artificial Sequence
  Synthetic Oligonucleotide
aagcaauaugauagugacgaaccug

SEQ ID NO: 2877 - RNA, 25 nt, Artificial Sequence
  Synthetic Oligonucleotide
agcaauaugauagugacgaaccuga

SEQ ID NO: 2878 - RNA, 25 nt, Artificial Sequence
  Synthetic Oligonucleotide
caauaugauagugacgaaccugaau

SEQ ID NO: 2879 - RNA, 25 nt, Artificial Sequence
  Synthetic Oligonucleotide
aauaugauagugacgaaccugaauu

SEQ ID NO: 2880 - RNA, 25 nt, Artificial Sequence
  Synthetic Oligonucleotide
uccuuucgucaguccgaaagaggcg

SEQ ID NO: 2881 - RNA, 25 nt, Artificial Sequence
  Synthetic Oligonucleotide
ccuuucgucaguccgaaagaggcga

SEQ ID NO: 2882 - RNA, 25 nt, Artificial Sequence
  Synthetic Oligonucleotide
ugaagcaauaugauagugacgaacc

SEQ ID NO: 2883 - RNA, 25 nt, Artificial Sequence
  Synthetic Oligonucleotide
gaagcaauaugauagugacgaaccu

SEQ ID NO: 2884 - RNA, 25 nt, Artificial Sequence
  Synthetic Oligonucleotide
uugaagcaauaugauagugacgaac

SEQ ID NO: 2885 - RNA, 25 nt, Artificial Sequence
  Synthetic Oligonucleotide
uuucgucaguccgaaagaggcgaag

SEQ ID NO: 2886 - RNA, 25 nt, Artificial Sequence
  Synthetic Oligonucleotide
augugguaaacuuugugagcaugga

SEQ ID NO: 2887 - RNA, 25 nt, Artificial Sequence
  Synthetic Oligonucleotide
gaugugguaaacuuugugagcaugg

SEQ ID NO: 2888 - RNA, 25 nt, Artificial Sequence
  Synthetic Oligonucleotide
uucgucaguccgaaagaggcgaaga

SEQ ID NO: 2889 - RNA, 25 nt, Artificial Sequence
  Synthetic Oligonucleotide
cuuucgucaguccgaaagaggcgaa

SEQ ID NO: 2890 - RNA, 25 nt, Artificial Sequence
  Synthetic Oligonucleotide
uuugaagcaauaugauagugacgaa

SEQ ID NO: 2891 - RNA, 25 nt, Artificial Sequence
  Synthetic Oligonucleotide
ggcaagcuuucucaaauguccaaag

SEQ ID NO: 2892 - RNA, 25 nt, Artificial Sequence
  Synthetic Oligonucleotide
gcaagcuuucucaaauguccaaaga

SEQ ID NO: 2893 - RNA, 25 nt, Artificial Sequence
  Synthetic Oligonucleotide
aagcuuucucaaauguccaaagaag

SEQ ID NO: 2894 - RNA, 25 nt, Artificial Sequence
  Synthetic Oligonucleotide
agcuuucucaaauguccaaagaagu

SEQ ID NO: 2895 - RNA, 25 nt, Artificial Sequence
  Synthetic Oligonucleotide
caagcuuucucaaauguccaaagaa

SEQ ID NO: 2896 - RNA, 25 nt, Artificial Sequence
  Synthetic Oligonucleotide
aacggcugcauugagggcaagcuuu

SEQ ID NO: 2897 - RNA, 25 nt, Artificial Sequence
  Synthetic Oligonucleotide
acggcugcauugagggcaagcuuuc

SEQ ID NO: 2898 - RNA, 25 nt, Artificial Sequence
  Synthetic Oligonucleotide
uccgaaagaggcgaagaaacaauug

SEQ ID NO: 2899 - RNA, 25 nt, Artificial Sequence
  Synthetic Oligonucleotide
ccgaaagaggcgaagaaacaauuga

SEQ ID NO: 2900 - RNA, 25 nt, Artificial Sequence
  Synthetic Oligonucleotide
aaagaggcgaagaaacaauugaaga

SEQ ID NO: 2901 - RNA, 25 nt, Artificial Sequence
  Synthetic Oligonucleotide
gaaagaggcgaagaaacaauugaag

SEQ ID NO: 2902 - RNA, 25 nt, Artificial Sequence
  Synthetic Oligonucleotide
aagaggcgaagaaacaauugaagaa

SEQ ID NO: 2903 - RNA, 25 nt, Artificial Sequence
  Synthetic Oligonucleotide
cgaaagaggcgaagaaacaauugaa

SEQ ID NO: 2904 - RNA, 25 nt, Artificial Sequence
  Synthetic Oligonucleotide
gaacggcugcauugagggcaagcuu

SEQ ID NO: 2905 - RNA, 25 nt, Artificial Sequence
  Synthetic Oligonucleotide
cgaacggcugcauugagggcaagcu

SEQ ID NO: 2906 - RNA, 25 nt, Artificial Sequence
  Synthetic Oligonucleotide
ccgaacggcugcauugagggcaagc

SEQ ID NO: 2907 - RNA, 25 nt, Artificial Sequence
  Synthetic Oligonucleotide
caguccgaaagaggcgaagaaacaa

SEQ ID NO: 2908 - RNA, 25 nt, Artificial Sequence
  Synthetic Oligonucleotide
aaccgaacggcugcauugagggcaa

SEQ ID NO: 2909 - RNA, 25 nt, Artificial Sequence
  Synthetic Oligonucleotide
accgaacggcugcauugagggcaag

SEQ ID NO: 2910 - RNA, 25 nt, Artificial Sequence
  Synthetic Oligonucleotide
aguccgaaagaggcgaagaaacaau

SEQ ID NO: 2911 - RNA, 25 nt, Artificial Sequence
  Synthetic Oligonucleotide
ucaguccgaaagaggcgaagaaaca

SEQ ID NO: 2912 - RNA, 25 nt, Artificial Sequence
  Synthetic Oligonucleotide
ucgucaguccgaaagaggcgaagaa

SEQ ID NO: 2913 - RNA, 25 nt, Artificial Sequence
  Synthetic Oligonucleotide
gucaguccgaaagaggcgaagaaac

SEQ ID NO: 2914 - RNA, 25 nt, Artificial Sequence
  Synthetic Oligonucleotide
cgucaguccgaaagaggcgaagaaa

SEQ ID NO: 2915 - RNA, 25 nt, Artificial Sequence
  Synthetic Oligonucleotide
guccgaaagaggcgaagaaacaauu

SEQ ID NO: 2916 - RNA, 25 nt, Artificial Sequence
  Synthetic Oligonucleotide
uuuuagagccuauguggauggauuc

SEQ ID NO: 2917 - RNA, 25 nt, Artificial Sequence
  Synthetic Oligonucleotide
gccuugagaauuuuagagccuaugu

SEQ ID NO: 2918 - RNA, 25 nt, Artificial Sequence
  Synthetic Oligonucleotide
ccugccuugagaauuuuagagccua

SEQ ID NO: 2919 - RNA, 25 nt, Artificial Sequence
  Synthetic Oligonucleotide
ugccuugagaauuuuagagccuaug

SEQ ID NO: 2920 - RNA, 25 nt, Artificial Sequence
  Synthetic Oligonucleotide
cugccuugagaauuuuagagccuau

SEQ ID NO: 2921 - RNA, 25 nt, Artificial Sequence
  Synthetic Oligonucleotide
uucuccugccuugagaauuuuagag

SEQ ID NO: 2922 - RNA, 25 nt, Artificial Sequence
  Synthetic Oligonucleotide
cuccugccuugagaauuuuagagcc

SEQ ID NO: 2923 - RNA, 25 nt, Artificial Sequence
  Synthetic Oligonucleotide
uccugccuugagaauuuuagagccu

SEQ ID NO: 2924 - RNA, 25 nt, Artificial Sequence
  Synthetic Oligonucleotide
ucuccugccuugagaauuuuagagc

SEQ ID NO: 2925 - RNA, 25 nt, Artificial Sequence
  Synthetic Oligonucleotide
aacuucuccugccuugagaauuuua

SEQ ID NO: 2926 - RNA, 25 nt, Artificial Sequence
  Synthetic Oligonucleotide
ccuugagaauuuuagagccuaugug

SEQ ID NO: 2927 - RNA, 25 nt, Artificial Sequence
  Synthetic Oligonucleotide
acuucuccugccuugagaauuuuag

SEQ ID NO: 2928 - RNA, 25 nt, Artificial Sequence
  Synthetic Oligonucleotide
cuugagaauuuuagagccuaugugg

SEQ ID NO: 2929 - RNA, 25 nt, Artificial Sequence
  Synthetic Oligonucleotide
cuucuccugccuugagaauuuuaga

SEQ ID NO: 2930 - RNA, 25 nt, Artificial Sequence
  Synthetic Oligonucleotide
gaacuucuccugccuugagaauuuu

SEQ ID NO: 2931 - RNA, 25 nt, Artificial Sequence
  Synthetic Oligonucleotide
ccgaacuucuccugccuugagaauu

SEQ ID NO: 2932 - RNA, 25 nt, Artificial Sequence
  Synthetic Oligonucleotide
cgaacuucuccugccuugagaauuu

SEQ ID NO: 2933 - RNA, 25 nt, Artificial Sequence
  Synthetic Oligonucleotide
gaaccgaacggcugcauugagggca

SEQ ID NO: 2934 - RNA, 25 nt, Artificial Sequence
  Synthetic Oligonucleotide
gauucgaaccgaacggcugcauuga

SEQ ID NO: 2935 - RNA, 25 nt, Artificial Sequence
  Synthetic Oligonucleotide
auggauucgaaccgaacggcugcau

SEQ ID NO: 2936 - RNA, 25 nt, Artificial Sequence
  Synthetic Oligonucleotide
gauggauucgaaccgaacggcugca

SEQ ID NO: 2937 - RNA, 25 nt, Artificial Sequence
  Synthetic Oligonucleotide
uggauucgaaccgaacggcugcauu

SEQ ID NO: 2938 - RNA, 25 nt, Artificial Sequence
  Synthetic Oligonucleotide
ggauucgaaccgaacggcugcauug

SEQ ID NO: 2939 - RNA, 25 nt, Artificial Sequence
  Synthetic Oligonucleotide
uggauggauucgaaccgaacggcug

SEQ ID NO: 2940 - RNA, 25 nt, Artificial Sequence
  Synthetic Oligonucleotide
ggauggauucgaaccgaacggcugc

SEQ ID NO: 2941 - RNA, 25 nt, Artificial Sequence
  Synthetic Oligonucleotide
uucgaaccgaacggcugcauugagg

SEQ ID NO: 2942 - RNA, 25 nt, Artificial Sequence
  Synthetic Oligonucleotide
ucgaaccgaacggcugcauugaggg

SEQ ID NO: 2943 - RNA, 25 nt, Artificial Sequence
  Synthetic Oligonucleotide
cgaaccgaacggcugcauugagggc

SEQ ID NO: 2944 - RNA, 25 nt, Artificial Sequence
  Synthetic Oligonucleotide
auucgaaccgaacggcugcauugag

SEQ ID NO: 2945 - RNA, 25 nt, Artificial Sequence
  Synthetic Oligonucleotide
auggcaccagagaaaguagacuuug

SEQ ID NO: 2946 - RNA, 25 nt, Artificial Sequence
  Synthetic Oligonucleotide
aacauggcaccagagaaaguagacu

SEQ ID NO: 2947 - RNA, 25 nt, Artificial Sequence
  Synthetic Oligonucleotide
acauggcaccagagaaaguagacuu

SEQ ID NO: 2948 - RNA, 25 nt, Artificial Sequence
  Synthetic Oligonucleotide
uggcaccagagaaaguagacuuuga

SEQ ID NO: 2949 - RNA, 25 nt, Artificial Sequence
  Synthetic Oligonucleotide
cauggcaccagagaaaguagacuuu

SEQ ID NO: 2950 - RNA, 25 nt, Artificial Sequence
  Synthetic Oligonucleotide
gcauugagggcaagcuuucucaaau

SEQ ID NO: 2951 - RNA, 25 nt, Artificial Sequence
  Synthetic Oligonucleotide
ugcauugagggcaagcuuucucaaa

SEQ ID NO: 2952 - RNA, 25 nt, Artificial Sequence
  Synthetic Oligonucleotide
gcugcauugagggcaagcuuucuca

SEQ ID NO: 2953 - RNA, 25 nt, Artificial Sequence
  Synthetic Oligonucleotide
ggcugcauugagggcaagcuuucuc

SEQ ID NO: 2954 - RNA, 25 nt, Artificial Sequence
  Synthetic Oligonucleotide
cggcugcauugagggcaagcuuucu

SEQ ID NO: 2955 - RNA, 25 nt, Artificial Sequence
  Synthetic Oligonucleotide
cugcauugagggcaagcuuucucaa

SEQ ID NO: 2956 - RNA, 25 nt, Artificial Sequence
  Synthetic Oligonucleotide
agaggccucugggauuccuuucguc

SEQ ID NO: 2957 - RNA, 25 nt, Artificial Sequence
  Synthetic Oligonucleotide
gaggccucugggauuccuuucguca

SEQ ID NO: 2958 - RNA, 25 nt, Artificial Sequence
  Synthetic Oligonucleotide
gccucugggauuccuuucgucaguc

SEQ ID NO: 2959 - RNA, 25 nt, Artificial Sequence
  Synthetic Oligonucleotide
ggccucugggauuccuuucgucagu

SEQ ID NO: 2960 - RNA, 25 nt, Artificial Sequence
  Synthetic Oligonucleotide
cagaggccucugggauuccuuucgu

SEQ ID NO: 2961 - RNA, 25 nt, Artificial Sequence
  Synthetic Oligonucleotide
aaauggaagauuuugugcgacaaug

SEQ ID NO: 2962 - RNA, 25 nt, Artificial Sequence
  Synthetic Oligonucleotide
aggccucugggauuccuuucgucag

SEQ ID NO: 2963 - RNA, 25 nt, Artificial Sequence
  Synthetic Oligonucleotide
aacaaauuugcagcaauaugcacuc

SEQ ID NO: 2964 - RNA, 25 nt, Artificial Sequence
  Synthetic Oligonucleotide
acaaauuugcagcaauaugcacuca

SEQ ID NO: 2965 - RNA, 25 nt, Artificial Sequence
  Synthetic Oligonucleotide
caaauuugcagcaauaugcacucac

SEQ ID NO: 2966 - RNA, 25 nt, Artificial Sequence
  Synthetic Oligonucleotide
aaugcauccugugcagcaauggacg

SEQ ID NO: 2967 - RNA, 25 nt, Artificial Sequence
  Synthetic Oligonucleotide
augcauccugugcagcaauggacga

SEQ ID NO: 2968 - RNA, 25 nt, Artificial Sequence
  Synthetic Oligonucleotide
aauggaagauuuugugcgacaaugc

SEQ ID NO: 2969 - RNA, 25 nt, Artificial Sequence
  Synthetic Oligonucleotide
gcauccugugcagcaauggacgauu

SEQ ID NO: 2970 - RNA, 25 nt, Artificial Sequence
  Synthetic Oligonucleotide
ugcauccugugcagcaauggacgau

SEQ ID NO: 2971 - RNA, 25 nt, Artificial Sequence
  Synthetic Oligonucleotide
cauccugugcagcaauggacgauuu

SEQ ID NO: 2972 - RNA, 25 nt, Artificial Sequence
  Synthetic Oligonucleotide
ucugggauuccuuucgucaguccga

SEQ ID NO: 2973 - RNA, 25 nt, Artificial Sequence
  Synthetic Oligonucleotide
cucugggauuccuuucgucaguccg

SEQ ID NO: 2974 - RNA, 25 nt, Artificial Sequence
  Synthetic Oligonucleotide
aaacaaauuugcagcaauaugcacu

SEQ ID NO: 2975 - RNA, 25 nt, Artificial Sequence
  Synthetic Oligonucleotide
agaaagacaugaccaaagaguuuuu

SEQ ID NO: 2976 - RNA, 25 nt, Artificial Sequence
  Synthetic Oligonucleotide
gagaaagacaugaccaaagaguuuu

SEQ ID NO: 2977 - RNA, 25 nt, Artificial Sequence
  Synthetic Oligonucleotide
ccucugggauuccuuucgucagucc

SEQ ID NO: 2978 - RNA, 25 nt, Artificial Sequence
  Synthetic Oligonucleotide
aagacaugaccaaagaguuuuuuga

SEQ ID NO: 2979 - RNA, 25 nt, Artificial Sequence
  Synthetic Oligonucleotide
aaagacaugaccaaagaguuuuuug

SEQ ID NO: 2980 - RNA, 25 nt, Artificial Sequence
  Synthetic Oligonucleotide
agacaugaccaaagaguuuuuugag

SEQ ID NO: 2981 - RNA, 25 nt, Artificial Sequence
  Synthetic Oligonucleotide
gacaugaccaaagaguuuuuugaga

SEQ ID NO: 2982 - RNA, 25 nt, Artificial Sequence
  Synthetic Oligonucleotide
gaaagacaugaccaaagaguuuuuu

SEQ ID NO: 2983 - RNA, 25 nt, Artificial Sequence
  Synthetic Oligonucleotide
caaggccuauguucuuguaugugag

SEQ ID NO: 2984 - RNA, 25 nt, Artificial Sequence
  Synthetic Oligonucleotide
ucaaggccuauguucuuguauguga

SEQ ID NO: 2985 - RNA, 25 nt, Artificial Sequence
  Synthetic Oligonucleotide
aaagaguuuuuugagaauaaaucag

SEQ ID NO: 2986 - RNA, 25 nt, Artificial Sequence
  Synthetic Oligonucleotide
aagaguuuuuugagaauaaaucaga

SEQ ID NO: 2987 - RNA, 25 nt, Artificial Sequence
  Synthetic Oligonucleotide
agaguuuuuugagaauaaaucagaa

SEQ ID NO: 2988 - RNA, 25 nt, Artificial Sequence
  Synthetic Oligonucleotide
acaugaccaaagaguuuuuugagaa

SEQ ID NO: 2989 - RNA, 25 nt, Artificial Sequence
  Synthetic Oligonucleotide
acagaggccucugggauuccuuucg

SEQ ID NO: 2990 - RNA, 25 nt, Artificial Sequence
  Synthetic Oligonucleotide
aacagaggccucugggauuccuuuc

SEQ ID NO: 2991 - RNA, 25 nt, Artificial Sequence
  Synthetic Oligonucleotide
uggccaacagaggccucugggauuc

SEQ ID NO: 2992 - RNA, 25 nt, Artificial Sequence
  Synthetic Oligonucleotide
caacagaggccucugggauuccuuu

SEQ ID NO: 2993 - RNA, 25 nt, Artificial Sequence
  Synthetic Oligonucleotide
ggccaacagaggccucugggauucc

SEQ ID NO: 2994 - RNA, 25 nt, Artificial Sequence
  Synthetic Oligonucleotide
ccaacagaggccucugggauuccuu

SEQ ID NO: 2995 - RNA, 25 nt, Artificial Sequence
  Synthetic Oligonucleotide
gccaacagaggccucugggauuccu

SEQ ID NO: 2996 - RNA, 25 nt, Artificial Sequence
  Synthetic Oligonucleotide
auggccaacagaggccucugggauu

SEQ ID NO: 2997 - RNA, 25 nt, Artificial Sequence
  Synthetic Oligonucleotide
uggccuggacaguaguaaacaguau

SEQ ID NO: 2998 - RNA, 25 nt, Artificial Sequence
  Synthetic Oligonucleotide
auggccuggacaguaguaaacagua

SEQ ID NO: 2999 - RNA, 25 nt, Artificial Sequence
  Synthetic Oligonucleotide
aaugggagaaauacuguguccuuga

SEQ ID NO: 3000 - RNA, 25 nt, Artificial Sequence
  Synthetic Oligonucleotide
aaaugggagaaauacuguguccuug

SEQ ID NO: 3001 - RNA, 25 nt, Artificial Sequence
  Synthetic Oligonucleotide
ucagauuuucauuucaucaaugaac

SEQ ID NO: 3002 - RNA, 25 nt, Artificial Sequence
  Synthetic Oligonucleotide
uucagauuuucauuucaucaaugaa

SEQ ID NO: 3003 - RNA, 25 nt, Artificial Sequence
  Synthetic Oligonucleotide
gagacauaagcgauuugaagcaaua

SEQ ID NO: 3004 - RNA, 25 nt, Artificial Sequence
  Synthetic Oligonucleotide
augaccaaagaguuuuuugagaaua

SEQ ID NO: 3005 - RNA, 25 nt, Artificial Sequence
  Synthetic Oligonucleotide
ccacauaaaugggagaaauacugug

SEQ ID NO: 3006 - RNA, 25 nt, Artificial Sequence
  Synthetic Oligonucleotide
agagacauaagcgauuugaagcaau

SEQ ID NO: 3007 - RNA, 25 nt, Artificial Sequence
  Synthetic Oligonucleotide
cacauaaaugggagaaauacugugu

SEQ ID NO: 3008 - RNA, 25 nt, Artificial Sequence
  Synthetic Oligonucleotide
gauuuucauuucaucaaugaacaag

SEQ ID NO: 3009 - RNA, 25 nt, Artificial Sequence
  Synthetic Oligonucleotide
caugaccaaagaguuuuuugagaau

SEQ ID NO: 3010 - RNA, 25 nt, Artificial Sequence
  Synthetic Oligonucleotide
agacauaagcgauuugaagcaauau

SEQ ID NO: 3011 - RNA, 25 nt, Artificial Sequence
  Synthetic Oligonucleotide
auuuucauuucaucaaugaacaagg

SEQ ID NO: 3012 - RNA, 25 nt, Artificial Sequence
  Synthetic Oligonucleotide
ucuuauuucuucggagacaaugcag

SEQ ID NO: 3013 - RNA, 25 nt, Artificial Sequence
  Synthetic Oligonucleotide
cuuauuucuucggagacaaugcaga

SEQ ID NO: 3014 - RNA, 25 nt, Artificial Sequence
  Synthetic Oligonucleotide
uaaugaaggaucuuauuucuucgga

SEQ ID NO: 3015 - RNA, 25 nt, Artificial Sequence
  Synthetic Oligonucleotide
augaaggaucuuauuucuucggaga

SEQ ID NO: 3016 - RNA, 25 nt, Artificial Sequence
  Synthetic Oligonucleotide
aaugaaggaucuuauuucuucggag

SEQ ID NO: 3017 - RNA, 25 nt, Artificial Sequence
  Synthetic Oligonucleotide
gaaggaucuuauuucuucggagaca

SEQ ID NO: 3018 - RNA, 25 nt, Artificial Sequence
  Synthetic Oligonucleotide
gaucuuauuucuucggagacaaugc

SEQ ID NO: 3019 - RNA, 25 nt, Artificial Sequence
  Synthetic Oligonucleotide
aaggaucuuauuucuucggagacaa

SEQ ID NO: 3020 - RNA, 25 nt, Artificial Sequence
  Synthetic Oligonucleotide
ggaucuuauuucuucggagacaaug

SEQ ID NO: 3021 - RNA, 25 nt, Artificial Sequence
  Synthetic Oligonucleotide
aggaucuuauuucuucggagacaau

SEQ ID NO: 3022 - RNA, 25 nt, Artificial Sequence
  Synthetic Oligonucleotide
ugaaggaucuuauuucuucggagac

SEQ ID NO: 3023 - RNA, 25 nt, Artificial Sequence
  Synthetic Oligonucleotide
aucuuauuucuucggagacaaugca

SEQ ID NO: 3024 - RNA, 25 nt, Artificial Sequence
  Synthetic Oligonucleotide
ugaguaaugaaggaucuuauuucuu

SEQ ID NO: 3025 - RNA, 25 nt, Artificial Sequence
  Synthetic Oligonucleotide
augaguaaugaaggaucuuauuucu

SEQ ID NO: 3026 - RNA, 25 nt, Artificial Sequence
  Synthetic Oligonucleotide
aguaaugaaggaucuuauuucuucg

SEQ ID NO: 3027 - RNA, 25 nt, Artificial Sequence
  Synthetic Oligonucleotide
gaguaaugaaggaucuuauuucuuc

SEQ ID NO: 3028 - RNA, 25 nt, Artificial Sequence
  Synthetic Oligonucleotide
guaaugaaggaucuuauuucuucgg

SEQ ID NO: 3029 - RNA, 25 nt, Artificial Sequence
  Synthetic Oligonucleotide
caggaaaugcugagaucgaagaucu

SEQ ID NO: 3030 - RNA, 25 nt, Artificial Sequence
  Synthetic Oligonucleotide
ccaggaaaugcugagaucgaagauc

SEQ ID NO: 3031 - RNA, 25 nt, Artificial Sequence
  Synthetic Oligonucleotide
ggaaaugcugagaucgaagaucuca

SEQ ID NO: 3032 - RNA, 25 nt, Artificial Sequence
  Synthetic Oligonucleotide
aggaaaugcugagaucgaagaucuc

SEQ ID NO: 3033 - RNA, 25 nt, Artificial Sequence
  Synthetic Oligonucleotide
ucagacaugagggcagaaaucauaa

SEQ ID NO: 3034 - RNA, 25 nt, Artificial Sequence
  Synthetic Oligonucleotide
aaaggaaaauuucaaacagcugcac

SEQ ID NO: 3035 - RNA, 25 nt, Artificial Sequence
  Synthetic Oligonucleotide
aaggaaaauuucaaacagcugcaca

SEQ ID NO: 3036 - RNA, 25 nt, Artificial Sequence
  Synthetic Oligonucleotide
acccaggaaaugcugagaucgaaga

SEQ ID NO: 3037 - RNA, 25 nt, Artificial Sequence
  Synthetic Oligonucleotide
aacccaggaaaugcugagaucgaag

SEQ ID NO: 3038 - RNA, 25 nt, Artificial Sequence
  Synthetic Oligonucleotide
cccaggaaaugcugagaucgaagau

SEQ ID NO: 3039 - RNA, 25 nt, Artificial Sequence
  Synthetic Oligonucleotide
ggaaaauuucaaacagcugcacaaa

SEQ ID NO: 3040 - RNA, 25 nt, Artificial Sequence
  Synthetic Oligonucleotide
aggaaaauuucaaacagcugcacaa

SEQ ID NO: 3041 - RNA, 25 nt, Artificial Sequence
  Synthetic Oligonucleotide
ggaacccaggaaaugcugagaucga

SEQ ID NO: 3042 - RNA, 25 nt, Artificial Sequence
  Synthetic Oligonucleotide
gaacccaggaaaugcugagaucgaa

SEQ ID NO: 3043 - RNA, 25 nt, Artificial Sequence
  Synthetic Oligonucleotide
cggaacccaggaaaugcugagaucg

SEQ ID NO: 3044 - RNA, 25 nt, Artificial Sequence
  Synthetic Oligonucleotide
agaggaguacaaauugcuucaaaug

SEQ ID NO: 3045 - RNA, 25 nt, Artificial Sequence
  Synthetic Oligonucleotide
gaggaguacaaauugcuucaaauga

SEQ ID NO: 3046 - RNA, 25 nt, Artificial Sequence
  Synthetic Oligonucleotide
aguggguacgacuucgaaaaagagg

SEQ ID NO: 3047 - RNA, 25 nt, Artificial Sequence
  Synthetic Oligonucleotide
guggguacgacuucgaaaaagaggg

SEQ ID NO: 3048 - RNA, 25 nt, Artificial Sequence
  Synthetic Oligonucleotide
ccaguggguacgacuucgaaaaaga

SEQ ID NO: 3049 - RNA, 25 nt, Artificial Sequence
  Synthetic Oligonucleotide
caguggguacgacuucgaaaaagag

SEQ ID NO: 3050 - RNA, 25 nt, Artificial Sequence
  Synthetic Oligonucleotide
gguacgacuucgaaaaagagggaua

SEQ ID NO: 3051 - RNA, 25 nt, Artificial Sequence
  Synthetic Oligonucleotide
ggguacgacuucgaaaaagagggau

SEQ ID NO: 3052 - RNA, 25 nt, Artificial Sequence
  Synthetic Oligonucleotide
uggguacgacuucgaaaaagaggga

SEQ ID NO: 3053 - RNA, 25 nt, Artificial Sequence
  Synthetic Oligonucleotide
cuagaggaguacaaauugcuucaaa

SEQ ID NO: 3054 - RNA, 25 nt, Artificial Sequence
  Synthetic Oligonucleotide
uagaggaguacaaauugcuucaaau

SEQ ID NO: 3055 - RNA, 25 nt, Artificial Sequence
  Synthetic Oligonucleotide
acuagaggaguacaaauugcuucaa

SEQ ID NO: 3056 - RNA, 25 nt, Artificial Sequence
  Synthetic Oligonucleotide
aauuucaaacagcugcacaaagagc

SEQ ID NO: 3057 - RNA, 25 nt, Artificial Sequence
  Synthetic Oligonucleotide
aaauuucaaacagcugcacaaagag

SEQ ID NO: 3058 - RNA, 25 nt, Artificial Sequence
  Synthetic Oligonucleotide
uucaaacagcugcacaaagagcaau

SEQ ID NO: 3059 - RNA, 25 nt, Artificial Sequence
  Synthetic Oligonucleotide
ucaaacagcugcacaaagagcaaug

SEQ ID NO: 3060 - RNA, 25 nt, Artificial Sequence
  Synthetic Oligonucleotide
auggcgucccaaggcaccaaacggu

SEQ ID NO: 3061 - RNA, 25 nt, Artificial Sequence
  Synthetic Oligonucleotide
uuucaaacagcugcacaaagagcaa

SEQ ID NO: 3062 - RNA, 25 nt, Artificial Sequence
  Synthetic Oligonucleotide
auuucaaacagcugcacaaagagca

SEQ ID NO: 3063 - RNA, 25 nt, Artificial Sequence
  Synthetic Oligonucleotide
uggcgucccaaggcaccaaacgguc

SEQ ID NO: 3064 - RNA, 25 nt, Artificial Sequence
  Synthetic Oligonucleotide
cuuaugagagaaugugcaacauucu

SEQ ID NO: 3065 - RNA, 25 nt, Artificial Sequence
  Synthetic Oligonucleotide
ugcuuaugagagaaugugcaacauu

SEQ ID NO: 3066 - RNA, 25 nt, Artificial Sequence
  Synthetic Oligonucleotide
gcuuaugagagaaugugcaacauuc

SEQ ID NO: 3067 - RNA, 25 nt, Artificial Sequence
  Synthetic Oligonucleotide
cgucccaaggcaccaaacggucuua

SEQ ID NO: 3068 - RNA, 25 nt, Artificial Sequence
  Synthetic Oligonucleotide
ggcgucccaaggcaccaaacggucu

SEQ ID NO: 3069 - RNA, 25 nt, Artificial Sequence
  Synthetic Oligonucleotide
gcgucccaaggcaccaaacggucuu

SEQ ID NO: 3070 - RNA, 25 nt, Artificial Sequence
  Synthetic Oligonucleotide
acaagagucagcugguguggauggc

SEQ ID NO: 3071 - RNA, 25 nt, Artificial Sequence
  Synthetic Oligonucleotide
aagagucagcugguguggauggcau

SEQ ID NO: 3072 - RNA, 25 nt, Artificial Sequence
  Synthetic Oligonucleotide
agagucagcugguguggauggcaug

SEQ ID NO: 3073 - RNA, 25 nt, Artificial Sequence
  Synthetic Oligonucleotide
cacaagagucagcugguguggaugg

SEQ ID NO: 3074 - RNA, 25 nt, Artificial Sequence
  Synthetic Oligonucleotide
agaauccagcacacaagagucagcu

SEQ ID NO: 3075 - RNA, 25 nt, Artificial Sequence
  Synthetic Oligonucleotide
gagaauccagcacacaagagucagc

SEQ ID NO: 3076 - RNA, 25 nt, Artificial Sequence
  Synthetic Oligonucleotide
caagagucagcugguguggauggca

SEQ ID NO: 3077 - RNA, 25 nt, Artificial Sequence
  Synthetic Oligonucleotide
gagucagcugguguggauggcaugc

SEQ ID NO: 3078 - RNA, 25 nt, Artificial Sequence
  Synthetic Oligonucleotide
acacaagagucagcugguguggaug

SEQ ID NO: 3079 - RNA, 25 nt, Artificial Sequence
  Synthetic Oligonucleotide
gcacacaagagucagcuggugugga

SEQ ID NO: 3080 - RNA, 25 nt, Artificial Sequence
  Synthetic Oligonucleotide
cacacaagagucagcugguguggau

SEQ ID NO: 3081 - RNA, 25 nt, Artificial Sequence
  Synthetic Oligonucleotide
agcacacaagagucagcuggugugg

SEQ ID NO: 3082 - RNA, 25 nt, Artificial Sequence
  Synthetic Oligonucleotide
ccagcacacaagagucagcuggugu

SEQ ID NO: 3083 - RNA, 25 nt, Artificial Sequence
  Synthetic Oligonucleotide
cagcacacaagagucagcuggugug

SEQ ID NO: 3084 - RNA, 25 nt, Artificial Sequence
  Synthetic Oligonucleotide
gaaaugcugagaucgaagaucucau

SEQ ID NO: 3085 - RNA, 25 nt, Artificial Sequence
  Synthetic Oligonucleotide
acgagaauccagcacacaagaguca

SEQ ID NO: 3086 - RNA, 25 nt, Artificial Sequence
  Synthetic Oligonucleotide
aacgagaauccagcacacaagaguc

SEQ ID NO: 3087 - RNA, 25 nt, Artificial Sequence
  Synthetic Oligonucleotide
gaauccagcacacaagagucagcug

SEQ ID NO: 3088 - RNA, 25 nt, Artificial Sequence
  Synthetic Oligonucleotide
auccagcacacaagagucagcuggu

SEQ ID NO: 3089 - RNA, 25 nt, Artificial Sequence
  Synthetic Oligonucleotide
aauccagcacacaagagucagcugg

SEQ ID NO: 3090 - RNA, 25 nt, Artificial Sequence
  Synthetic Oligonucleotide
caaggcaccaaacggucuuaugaac

SEQ ID NO: 3091 - RNA, 25 nt, Artificial Sequence
  Synthetic Oligonucleotide
aaggcaccaaacggucuuaugaaca

SEQ ID NO: 3092 - RNA, 25 nt, Artificial Sequence
  Synthetic Oligonucleotide
cgagaauccagcacacaagagucag

SEQ ID NO: 3093 - RNA, 25 nt, Artificial Sequence
  Synthetic Oligonucleotide
caaauugcuucaaaugagaacaugg

SEQ ID NO: 3094 - RNA, 25 nt, Artificial Sequence
  Synthetic Oligonucleotide
aaauugcuucaaaugagaacaugga

SEQ ID NO: 3095 - RNA, 25 nt, Artificial Sequence
  Synthetic Oligonucleotide
cgaacccgaucgugcccucuuuuga

SEQ ID NO: 3096 - RNA, 25 nt, Artificial Sequence
  Synthetic Oligonucleotide
aagaagaaauaaggcgaaucuggcg

SEQ ID NO: 3097 - RNA, 25 nt, Artificial Sequence
  Synthetic Oligonucleotide
aaagaagaaauaaggcgaaucuggc

SEQ ID NO: 3098 - RNA, 25 nt, Artificial Sequence
  Synthetic Oligonucleotide
accaaacggucuuaugaacagaugg

SEQ ID NO: 3099 - RNA, 25 nt, Artificial Sequence
  Synthetic Oligonucleotide
ccaaacggucuuaugaacagaugga

SEQ ID NO: 3100 - RNA, 25 nt, Artificial Sequence
  Synthetic Oligonucleotide
caccaaacggucuuaugaacagaug

SEQ ID NO: 3101 - RNA, 25 nt, Artificial Sequence
  Synthetic Oligonucleotide
uccagcacacaagagucagcuggug

SEQ ID NO: 3102 - RNA, 25 nt, Artificial Sequence
  Synthetic Oligonucleotide
gcaccaaacggucuuaugaacagau

SEQ ID NO: 3103 - RNA, 25 nt, Artificial Sequence
  Synthetic Oligonucleotide
ggcaccaaacggucuuaugaacaga

SEQ ID NO: 3104 - RNA, 25 nt, Artificial Sequence
  Synthetic Oligonucleotide
aggcaccaaacggucuuaugaacag

SEQ ID NO: 3105 - RNA, 25 nt, Artificial Sequence
  Synthetic Oligonucleotide
gaaaauuucaaacagcugcacaaag

SEQ ID NO: 3106 - RNA, 25 nt, Artificial Sequence
  Synthetic Oligonucleotide
ggaugagggaacucguccuuuauga

SEQ ID NO: 3107 - RNA, 25 nt, Artificial Sequence
  Synthetic Oligonucleotide
uggaugagggaacucguccuuuaug

SEQ ID NO: 3108 - RNA, 25 nt, Artificial Sequence
  Synthetic Oligonucleotide
aguggaggaaacacuaaucaacaga

SEQ ID NO: 3109 - RNA, 25 nt, Artificial Sequence
  Synthetic Oligonucleotide
uauugagagggucaguugcucacaa

SEQ ID NO: 3110 - RNA, 25 nt, Artificial Sequence
  Synthetic Oligonucleotide
guggaggaaacacuaaucaacagag

SEQ ID NO: 3111 - RNA, 25 nt, Artificial Sequence
  Synthetic Oligonucleotide
cagacaugagggcagaaaucauaag

SEQ ID NO: 3112 - RNA, 25 nt, Artificial Sequence
  Synthetic Oligonucleotide
auauugagagggucaguugcucaca

SEQ ID NO: 3113 - RNA, 25 nt, Artificial Sequence
  Synthetic Oligonucleotide
ucuuaugaacagauggaaacugaug

SEQ ID NO: 3114 - RNA, 25 nt, Artificial Sequence
  Synthetic Oligonucleotide
cuuaugaacagauggaaacugaugg

SEQ ID NO: 3115 - RNA, 25 nt, Artificial Sequence
  Synthetic Oligonucleotide
ggaggaaacacuaaucaacagaggg

SEQ ID NO: 3116 - RNA, 25 nt, Artificial Sequence
  Synthetic Oligonucleotide
gaggaaacacuaaucaacagagggc

SEQ ID NO: 3117 - RNA, 25 nt, Artificial Sequence
  Synthetic Oligonucleotide
uggaggaaacacuaaucaacagagg

SEQ ID NO: 3118 - RNA, 25 nt, Artificial Sequence
  Synthetic Oligonucleotide
ggaaacacuaaucaacagagggccu

SEQ ID NO: 3119 - RNA, 25 nt, Artificial Sequence
  Synthetic Oligonucleotide
aacggucuuaugaacagauggaaac

SEQ ID NO: 3120 - RNA, 25 nt, Artificial Sequence
  Synthetic Oligonucleotide
caaacggucuuaugaacagauggaa

SEQ ID NO: 3121 - RNA, 25 nt, Artificial Sequence
  Synthetic Oligonucleotide
aaacggucuuaugaacagauggaaa

SEQ ID NO: 3122 - RNA, 25 nt, Artificial Sequence
  Synthetic Oligonucleotide
gaaacacuaaucaacagagggccuc

SEQ ID NO: 3123 - RNA, 25 nt, Artificial Sequence
  Synthetic Oligonucleotide
ggucuuaugaacagauggaaacuga

SEQ ID NO: 3124 - RNA, 25 nt, Artificial Sequence
  Synthetic Oligonucleotide
aaaauuucaaacagcugcacaaaga

SEQ ID NO: 3125 - RNA, 25 nt, Artificial Sequence
  Synthetic Oligonucleotide
cggucuuaugaacagauggaaacug

SEQ ID NO: 3126 - RNA, 25 nt, Artificial Sequence
  Synthetic Oligonucleotide
acggucuuaugaacagauggaaacu

SEQ ID NO: 3127 - RNA, 25 nt, Artificial Sequence
  Synthetic Oligonucleotide
gucuuaugaacagauggaaacugau

SEQ ID NO: 3128 - RNA, 25 nt, Artificial Sequence
  Synthetic Oligonucleotide
augaacagauggaaacugaugggga

SEQ ID NO: 3129 - RNA, 25 nt, Artificial Sequence
  Synthetic Oligonucleotide
uaugaacagauggaaacugaugggg

SEQ ID NO: 3130 - RNA, 25 nt, Artificial Sequence
  Synthetic Oligonucleotide
uuaugaacagauggaaacugauggg

SEQ ID NO: 3131 - RNA, 25 nt, Artificial Sequence
  Synthetic Oligonucleotide
guggaccucaaacaguauuguugug

SEQ ID NO: 3132 - RNA, 25 nt, Artificial Sequence
  Synthetic Oligonucleotide
uggaccucaaacaguauuguugugu

SEQ ID NO: 3133 - RNA, 25 nt, Artificial Sequence
  Synthetic Oligonucleotide
ggaccucaaacaguauuguuguguu

SEQ ID NO: 3134 - RNA, 25 nt, Artificial Sequence
  Synthetic Oligonucleotide
caaacaguauuguuguguuuugugg

SEQ ID NO: 3135 - RNA, 25 nt, Artificial Sequence
  Synthetic Oligonucleotide
ucaaacaguauuguuguguuuugug

SEQ ID NO: 3136 - RNA, 25 nt, Artificial Sequence
  Synthetic Oligonucleotide
gaccucaaacaguauuguuguguuu

SEQ ID NO: 3137 - RNA, 25 nt, Artificial Sequence
  Synthetic Oligonucleotide
ccucaaacaguauuguuguguuuug

SEQ ID NO: 3138 - RNA, 25 nt, Artificial Sequence
  Synthetic Oligonucleotide
cucaaacaguauuguuguguuuugu

SEQ ID NO: 3139 - RNA, 25 nt, Artificial Sequence
  Synthetic Oligonucleotide
accucaaacaguauuguuguguuuu

SEQ ID NO: 3140 - RNA, 25 nt, Artificial Sequence
  Synthetic Oligonucleotide
ugguccagcucaaguugucacgaug

SEQ ID NO: 3141 - RNA, 25 nt, Artificial Sequence
  Synthetic Oligonucleotide
gguccagcucaaguugucacgaugg

SEQ ID NO: 3142 - RNA, 25 nt, Artificial Sequence
  Synthetic Oligonucleotide
ucugcagagacaacuggaaaggcuc

SEQ ID NO: 3143 - RNA, 25 nt, Artificial Sequence
  Synthetic Oligonucleotide
gcucaaguugucacgauggaaaagc

SEQ ID NO: 3144 - RNA, 25 nt, Artificial Sequence
  Synthetic Oligonucleotide
uccagcucaaguugucacgauggaa

SEQ ID NO: 3145 - RNA, 25 nt, Artificial Sequence
  Synthetic Oligonucleotide
agcucaaguugucacgauggaaaag

SEQ ID NO: 3146 - RNA, 25 nt, Artificial Sequence
  Synthetic Oligonucleotide
guccagcucaaguugucacgaugga

SEQ ID NO: 3147 - RNA, 25 nt, Artificial Sequence
  Synthetic Oligonucleotide
ccagcucaaguugucacgauggaaa

SEQ ID NO: 3148 - RNA, 25 nt, Artificial Sequence
  Synthetic Oligonucleotide
ucaaguugucacgauggaaaagcau

SEQ ID NO: 3149 - RNA, 25 nt, Artificial Sequence
  Synthetic Oligonucleotide
aaguugucacgauggaaaagcaugg

SEQ ID NO: 3150 - RNA, 25 nt, Artificial Sequence
  Synthetic Oligonucleotide
caaguugucacgauggaaaagcaug

SEQ ID NO: 3151 - RNA, 25 nt, Artificial Sequence
  Synthetic Oligonucleotide
cagcucaaguugucacgauggaaaa

SEQ ID NO: 3152 - RNA, 25 nt, Artificial Sequence
  Synthetic Oligonucleotide
aacaguauuguuguguuuuguggca

SEQ ID NO: 3153 - RNA, 25 nt, Artificial Sequence
  Synthetic Oligonucleotide
acaguauuguuguguuuuguggcac

SEQ ID NO: 3154 - RNA, 25 nt, Artificial Sequence
  Synthetic Oligonucleotide
aaacaguauuguuguguuuuguggc

SEQ ID NO: 3155 - RNA, 25 nt, Artificial Sequence
  Synthetic Oligonucleotide
uagcaugguccagcucaaguuguca

SEQ ID NO: 3156 - RNA, 25 nt, Artificial Sequence
  Synthetic Oligonucleotide
uuuuauguggaguugauaaggggaa

SEQ ID NO: 3157 - RNA, 25 nt, Artificial Sequence
  Synthetic Oligonucleotide
uuuauguggaguugauaaggggaag

SEQ ID NO: 3158 - RNA, 25 nt, Artificial Sequence
  Synthetic Oligonucleotide
cucaaguugucacgauggaaaagca

SEQ ID NO: 3159 - RNA, 25 nt, Artificial Sequence
  Synthetic Oligonucleotide
ugcuuuuauguggaguugauaaggg

SEQ ID NO: 3160 - RNA, 25 nt, Artificial Sequence
  Synthetic Oligonucleotide
cuuuuauguggaguugauaagggga

SEQ ID NO: 3161 - RNA, 25 nt, Artificial Sequence
  Synthetic Oligonucleotide
gcuuuuauguggaguugauaagggg

SEQ ID NO: 3162 - RNA, 25 nt, Artificial Sequence
  Synthetic Oligonucleotide
caugguccagcucaaguugucacga

SEQ ID NO: 3163 - RNA, 25 nt, Artificial Sequence
  Synthetic Oligonucleotide
gcaugguccagcucaaguugucacg

SEQ ID NO: 3164 - RNA, 25 nt, Artificial Sequence
  Synthetic Oligonucleotide
ggugcuuuuauguggaguugauaag

SEQ ID NO: 3165 - RNA, 25 nt, Artificial Sequence
  Synthetic Oligonucleotide
agcaugguccagcucaaguugucac

SEQ ID NO: 3166 - RNA, 25 nt, Artificial Sequence
  Synthetic Oligonucleotide
augguccagcucaaguugucacgau

SEQ ID NO: 3167 - RNA, 25 nt, Artificial Sequence
  Synthetic Oligonucleotide
auggaaaagcauggcugcauguuug

SEQ ID NO: 3168 - RNA, 25 nt, Artificial Sequence
  Synthetic Oligonucleotide
uggaaaagcauggcugcauguuugu

SEQ ID NO: 3169 - RNA, 25 nt, Artificial Sequence
  Synthetic Oligonucleotide
gugcuuuuauguggaguugauaagg

SEQ ID NO: 3170 - RNA, 25 nt, Artificial Sequence
  Synthetic Oligonucleotide
gauggaaaagcauggcugcauguuu

SEQ ID NO: 3171 - RNA, 25 nt, Artificial Sequence
  Synthetic Oligonucleotide
uauggaacaggcucauggccugaug

SEQ ID NO: 3172 - RNA, 25 nt, Artificial Sequence
  Synthetic Oligonucleotide
auggaacaggcucauggccugaugg

SEQ ID NO: 3173 - RNA, 25 nt, Artificial Sequence
  Synthetic Oligonucleotide
cacgauggaaaagcauggcugcaug

SEQ ID NO: 3174 - RNA, 25 nt, Artificial Sequence
  Synthetic Oligonucleotide
acgauggaaaagcauggcugcaugu

SEQ ID NO: 3175 - RNA, 25 nt, Artificial Sequence
  Synthetic Oligonucleotide
ucacgauggaaaagcauggcugcau

SEQ ID NO: 3176 - RNA, 25 nt, Artificial Sequence
  Synthetic Oligonucleotide
gucacgauggaaaagcauggcugca

SEQ ID NO: 3177 - RNA, 25 nt, Artificial Sequence
  Synthetic Oligonucleotide
ugucacgauggaaaagcauggcugc

SEQ ID NO: 3178 - RNA, 25 nt, Artificial Sequence
  Synthetic Oligonucleotide
cgauggaaaagcauggcugcauguu

SEQ ID NO: 3179 - RNA, 25 nt, Artificial Sequence
  Synthetic Oligonucleotide
guugucacgauggaaaagcauggcu

SEQ ID NO: 3180 - RNA, 25 nt, Artificial Sequence
  Synthetic Oligonucleotide
aguugucacgauggaaaagcauggc

SEQ ID NO: 3181 - RNA, 25 nt, Artificial Sequence
  Synthetic Oligonucleotide
uugucacgauggaaaagcauggcug

SEQ ID NO: 3182 - RNA, 25 nt, Artificial Sequence
  Synthetic Oligonucleotide
aaaaugcaacugcuagcuucauuua

SEQ ID NO: 3183 - RNA, 25 nt, Artificial Sequence
  Synthetic Oligonucleotide
auagcaugguccagcucaaguuguc

SEQ ID NO: 3184 - RNA, 25 nt, Artificial Sequence
  Synthetic Oligonucleotide
agagaaccuuaugugucaugcgauc

SEQ ID NO: 3185 - RNA, 25 nt, Artificial Sequence
  Synthetic Oligonucleotide
uucacgcucaccgugcccagugagc

SEQ ID NO: 3186 - RNA, 25 nt, Artificial Sequence
  Synthetic Oligonucleotide
ucacgcucaccgugcccagugagcg

SEQ ID NO: 3187 - RNA, 25 nt, Artificial Sequence
  Synthetic Oligonucleotide
gacugcagcguagacgcuuugucca

SEQ ID NO: 3188 - RNA, 25 nt, Artificial Sequence
  Synthetic Oligonucleotide
ggacugcagcguagacgcuuugucc

SEQ ID NO: 3189 - RNA, 25 nt, Artificial Sequence
  Synthetic Oligonucleotide
guagacgcuuuguccaaaaugcccu

SEQ ID NO: 3190 - RNA, 25 nt, Artificial Sequence
  Synthetic Oligonucleotide
cguagacgcuuuguccaaaaugccc

SEQ ID NO: 3191 - RNA, 25 nt, Artificial Sequence
  Synthetic Oligonucleotide
ugcagcguagacgcuuuguccaaaa

SEQ ID NO: 3192 - RNA, 25 nt, Artificial Sequence
  Synthetic Oligonucleotide
cugcagcguagacgcuuuguccaaa

SEQ ID NO: 3193 - RNA, 25 nt, Artificial Sequence
  Synthetic Oligonucleotide
acugcagcguagacgcuuuguccaa

SEQ ID NO: 3194 - RNA, 25 nt, Artificial Sequence
  Synthetic Oligonucleotide
gccagcacuacagcuaaggcuaugg

SEQ ID NO: 3195 - RNA, 25 nt, Artificial Sequence
  Synthetic Oligonucleotide
cagcguagacgcuuuguccaaaaug

SEQ ID NO: 3196 - RNA, 25 nt, Artificial Sequence
  Synthetic Oligonucleotide
ccagcacuacagcuaaggcuaugga

SEQ ID NO: 3197 - RNA, 25 nt, Artificial Sequence
  Synthetic Oligonucleotide
gcagcguagacgcuuuguccaaaau

SEQ ID NO: 3198 - RNA, 25 nt, Artificial Sequence
  Synthetic Oligonucleotide
agcguagacgcuuuguccaaaaugc

SEQ ID NO: 3199 - RNA, 25 nt, Artificial Sequence
  Synthetic Oligonucleotide
ucaguuauucugcuggugcacuugc

SEQ ID NO: 3200 - RNA, 25 nt, Artificial Sequence
  Synthetic Oligonucleotide
gcacuacagcuaaggcuauggagca

SEQ ID NO: 3201 - RNA, 25 nt, Artificial Sequence
  Synthetic Oligonucleotide
agcacuacagcuaaggcuauggagc

SEQ ID NO: 3202 - RNA, 25 nt, Artificial Sequence
  Synthetic Oligonucleotide
cucaguuauucugcuggugcacuug

SEQ ID NO: 3203 - RNA, 25 nt, Artificial Sequence
  Synthetic Oligonucleotide
cagcacuacagcuaaggcuauggag

SEQ ID NO: 3204 - RNA, 25 nt, Artificial Sequence
  Synthetic Oligonucleotide
gcguagacgcuuuguccaaaaugcc

SEQ ID NO: 3205 - RNA, 25 nt, Artificial Sequence
  Synthetic Oligonucleotide
uauucugcuggugcacuugccaguu

SEQ ID NO: 3206 - RNA, 25 nt, Artificial Sequence
  Synthetic Oligonucleotide
auucugcuggugcacuugccaguug

SEQ ID NO: 3207 - RNA, 25 nt, Artificial Sequence
  Synthetic Oligonucleotide
uggccagcacuacagcuaaggcuau

SEQ ID NO: 3208 - RNA, 25 nt, Artificial Sequence
  Synthetic Oligonucleotide
ggccagcacuacagcuaaggcuaug

SEQ ID NO: 3209 - RNA, 25 nt, Artificial Sequence
  Synthetic Oligonucleotide
guuauucugcuggugcacuugccag

SEQ ID NO: 3210 - RNA, 25 nt, Artificial Sequence
  Synthetic Oligonucleotide
aguuauucugcuggugcacuugcca

SEQ ID NO: 3211 - RNA, 25 nt, Artificial Sequence
  Synthetic Oligonucleotide
uuauucugcuggugcacuugccagu

SEQ ID NO: 3212 - RNA, 25 nt, Artificial Sequence
  Synthetic Oligonucleotide
caguuauucugcuggugcacuugcc

SEQ ID NO: 3213 - RNA, 25 nt, Artificial Sequence
  Synthetic Oligonucleotide
ucauggaauggcuaaagacaagacc

SEQ ID NO: 3214 - RNA, 25 nt, Artificial Sequence
  Synthetic Oligonucleotide
cucauggaauggcuaaagacaagac

SEQ ID NO: 3215 - RNA, 25 nt, Artificial Sequence
  Synthetic Oligonucleotide
ucucauggaauggcuaaagacaaga

SEQ ID NO: 3216 - RNA, 25 nt, Artificial Sequence
  Synthetic Oligonucleotide
gcucucauggaauggcuaaagacaa

SEQ ID NO: 3217 - RNA, 25 nt, Artificial Sequence
  Synthetic Oligonucleotide
ugucaccucugacuaaggggauuuu

SEQ ID NO: 3218 - RNA, 25 nt, Artificial Sequence
  Synthetic Oligonucleotide
cugucaccucugacuaaggggauuu

SEQ ID NO: 3219 - RNA, 25 nt, Artificial Sequence
  Synthetic Oligonucleotide
aggcucucauggaauggcuaaagac

SEQ ID NO: 3220 - RNA, 25 nt, Artificial Sequence
  Synthetic Oligonucleotide
gaggcucucauggaauggcuaaaga

SEQ ID NO: 3221 - RNA, 25 nt, Artificial Sequence
  Synthetic Oligonucleotide
ggcucucauggaauggcuaaagaca

SEQ ID NO: 3222 - RNA, 25 nt, Artificial Sequence
  Synthetic Oligonucleotide
cucucauggaauggcuaaagacaag

SEQ ID NO: 3223 - RNA, 25 nt, Artificial Sequence
  Synthetic Oligonucleotide
cuugaggcucucauggaauggcuaa

SEQ ID NO: 3224 - RNA, 25 nt, Artificial Sequence
  Synthetic Oligonucleotide
uugaggcucucauggaauggcuaaa

SEQ ID NO: 3225 - RNA, 25 nt, Artificial Sequence
  Synthetic Oligonucleotide
ugaggcucucauggaauggcuaaag

SEQ ID NO: 3226 - RNA, 25 nt, Artificial Sequence
  Synthetic Oligonucleotide
gaucuugaggcucucauggaauggc

SEQ ID NO: 3227 - RNA, 25 nt, Artificial Sequence
  Synthetic Oligonucleotide
aucuugaggcucucauggaauggcu

SEQ ID NO: 3228 - RNA, 25 nt, Artificial Sequence
  Synthetic Oligonucleotide
ucuugaggcucucauggaauggcua

SEQ ID NO: 3229 - RNA, 25 nt, Artificial Sequence
  Synthetic Oligonucleotide
augggggugcagaugcaacgauuca

SEQ ID NO: 3230 - RNA, 25 nt, Artificial Sequence
  Synthetic Oligonucleotide
ugggggugcagaugcaacgauucaa

SEQ ID NO: 3231 - RNA, 25 nt, Artificial Sequence
  Synthetic Oligonucleotide
uguucacgcucaccgugcccaguga

SEQ ID NO: 3232 - RNA, 25 nt, Artificial Sequence
  Synthetic Oligonucleotide
agagacuugaagaugucuuugcugg

SEQ ID NO: 3233 - RNA, 25 nt, Artificial Sequence
  Synthetic Oligonucleotide
cagagacuugaagaugucuuugcug

SEQ ID NO: 3234 - RNA, 25 nt, Artificial Sequence
  Synthetic Oligonucleotide
guguucacgcucaccgugcccagug

SEQ ID NO: 3235 - RNA, 25 nt, Artificial Sequence
  Synthetic Oligonucleotide
uuuguguucacgcucaccgugccca

SEQ ID NO: 3236 - RNA, 25 nt, Artificial Sequence
  Synthetic Oligonucleotide
guucacgcucaccgugcccagugag

SEQ ID NO: 3237 - RNA, 25 nt, Artificial Sequence
  Synthetic Oligonucleotide
uuguguucacgcucaccgugcccag

SEQ ID NO: 3238 - RNA, 25 nt, Artificial Sequence
  Synthetic Oligonucleotide
uguguucacgcucaccgugcccagu

SEQ ID NO: 3239 - RNA, 25 nt, Artificial Sequence
  Synthetic Oligonucleotide
gaaugggggugcagaugcaacgauu

SEQ ID NO: 3240 - RNA, 25 nt, Artificial Sequence
  Synthetic Oligonucleotide
aaugggggugcagaugcaacgauuc

SEQ ID NO: 3241 - RNA, 25 nt, Artificial Sequence
  Synthetic Oligonucleotide
cgaaugggggugcagaugcaacgau

SEQ ID NO: 3242 - RNA, 25 nt, Artificial Sequence
  Synthetic Oligonucleotide
cagaaacgaaugggggugcagaugc

SEQ ID NO: 3243 - RNA, 25 nt, Artificial Sequence
  Synthetic Oligonucleotide
agaaacgaaugggggugcagaugca

SEQ ID NO: 3244 - RNA, 25 nt, Artificial Sequence
  Synthetic Oligonucleotide
aaacgaaugggggugcagaugcaac

SEQ ID NO: 3245 - RNA, 25 nt, Artificial Sequence
  Synthetic Oligonucleotide
aacgaaugggggugcagaugcaacg

SEQ ID NO: 3246 - RNA, 25 nt, Artificial Sequence
  Synthetic Oligonucleotide
gaaacgaaugggggugcagaugcaa

SEQ ID NO: 3247 - RNA, 25 nt, Artificial Sequence
  Synthetic Oligonucleotide
acgaaugggggugcagaugcaacga

SEQ ID NO: 3248 - RNA, 25 nt, Artificial Sequence
  Synthetic Oligonucleotide
cuaaggcuauggagcaaauggcugg

SEQ ID NO: 3249 - RNA, 25 nt, Artificial Sequence
  Synthetic Oligonucleotide
gcuaaggcuauggagcaaauggcug

SEQ ID NO: 3250 - RNA, 25 nt, Artificial Sequence
  Synthetic Oligonucleotide
cagcuaaggcuauggagcaaauggc

SEQ ID NO: 3251 - RNA, 25 nt, Artificial Sequence
  Synthetic Oligonucleotide
acagcuaaggcuauggagcaaaugg

SEQ ID NO: 3252 - RNA, 25 nt, Artificial Sequence
  Synthetic Oligonucleotide
uacagcuaaggcuauggagcaaaug

SEQ ID NO: 3253 - RNA, 25 nt, Artificial Sequence
  Synthetic Oligonucleotide
ccuaucagaaacgaaugggggugca

SEQ ID NO: 3254 - RNA, 25 nt, Artificial Sequence
  Synthetic Oligonucleotide
acuacagcuaaggcuauggagcaaa

SEQ ID NO: 3255 - RNA, 25 nt, Artificial Sequence
  Synthetic Oligonucleotide
cuacagcuaaggcuauggagcaaau

SEQ ID NO: 3256 - RNA, 25 nt, Artificial Sequence
  Synthetic Oligonucleotide
cacuacagcuaaggcuauggagcaa

SEQ ID NO: 3257 - RNA, 25 nt, Artificial Sequence
  Synthetic Oligonucleotide
agcuaaggcuauggagcaaauggcu

SEQ ID NO: 3258 - RNA, 25 nt, Artificial Sequence
  Synthetic Oligonucleotide
aacagcagaaugcuguggaugcuga

SEQ ID NO: 3259 - RNA, 25 nt, Artificial Sequence
  Synthetic Oligonucleotide
gaacagcagaaugcuguggaugcug

SEQ ID NO: 3260 - RNA, 25 nt, Artificial Sequence
  Synthetic Oligonucleotide
cuaucagaaacgaaugggggugcag

SEQ ID NO: 3261 - RNA, 25 nt, Artificial Sequence
  Synthetic Oligonucleotide
ggaacagcagaaugcuguggaugcu

SEQ ID NO: 3262 - RNA, 25 nt, Artificial Sequence
  Synthetic Oligonucleotide
aucagaaacgaaugggggugcagau

SEQ ID NO: 3263 - RNA, 25 nt, Artificial Sequence
  Synthetic Oligonucleotide
uaucauugggaucuugcacuugaua

SEQ ID NO: 3264 - RNA, 25 nt, Artificial Sequence
  Synthetic Oligonucleotide
uaucagaaacgaaugggggugcaga

SEQ ID NO: 3265 - RNA, 25 nt, Artificial Sequence
  Synthetic Oligonucleotide
ucagaaacgaaugggggugcagaug

SEQ ID NO: 3266 - RNA, 25 nt, Artificial Sequence
  Synthetic Oligonucleotide
aggaacagcagaaugcuguggaugc

SEQ ID NO: 3267 - RNA, 25 nt, Artificial Sequence
  Synthetic Oligonucleotide
cagcagaaugcuguggaugcugacg

SEQ ID NO: 3268 - RNA, 25 nt, Artificial Sequence
  Synthetic Oligonucleotide
acagcagaaugcuguggaugcugac

SEQ ID NO: 3269 - RNA, 25 nt, Artificial Sequence
  Synthetic Oligonucleotide
agcagaaugcuguggaugcugacga

SEQ ID NO: 3270 - RNA, 25 nt, Artificial Sequence
  Synthetic Oligonucleotide
auggaauggcuaaagacaagaccaa

SEQ ID NO: 3271 - RNA, 25 nt, Artificial Sequence
  Synthetic Oligonucleotide
uggaauggcuaaagacaagaccaau

SEQ ID NO: 3272 - RNA, 25 nt, Artificial Sequence
  Synthetic Oligonucleotide
cauggaauggcuaaagacaagacca

SEQ ID NO: 3273 - RNA, 25 nt, Artificial Sequence
  Synthetic Oligonucleotide
accgugcccagugagcgaggacugc

SEQ ID NO: 3274 - RNA, 25 nt, Artificial Sequence
  Synthetic Oligonucleotide
ucaccgugcccagugagcgaggacu

SEQ ID NO: 3275 - RNA, 25 nt, Artificial Sequence
  Synthetic Oligonucleotide
cucaccgugcccagugagcgaggac

SEQ ID NO: 3276 - RNA, 25 nt, Artificial Sequence
  Synthetic Oligonucleotide
ccgugcccagugagcgaggacugca

SEQ ID NO: 3277 - RNA, 25 nt, Artificial Sequence
  Synthetic Oligonucleotide
caccgugcccagugagcgaggacug

SEQ ID NO: 3278 - RNA, 25 nt, Artificial Sequence
  Synthetic Oligonucleotide
acgcucaccgugcccagugagcgag

SEQ ID NO: 3279 - RNA, 25 nt, Artificial Sequence
  Synthetic Oligonucleotide
cacgcucaccgugcccagugagcga

SEQ ID NO: 3280 - RNA, 25 nt, Artificial Sequence
  Synthetic Oligonucleotide
gcucaccgugcccagugagcgagga

SEQ ID NO: 3281 - RNA, 25 nt, Artificial Sequence
  Synthetic Oligonucleotide
cgcucaccgugcccagugagcgagg

SEQ ID NO: 3282 - RNA, 25 nt, Artificial Sequence
  Synthetic Oligonucleotide
cccagugagcgaggacugcagcgua

SEQ ID NO: 3283 - RNA, 25 nt, Artificial Sequence
  Synthetic Oligonucleotide
gugagcgaggacugcagcguagacg

SEQ ID NO: 3284 - RNA, 25 nt, Artificial Sequence
  Synthetic Oligonucleotide
agugagcgaggacugcagcguagac

SEQ ID NO: 3285 - RNA, 25 nt, Artificial Sequence
  Synthetic Oligonucleotide
gugcccagugagcgaggacugcagc

SEQ ID NO: 3286 - RNA, 25 nt, Artificial Sequence
  Synthetic Oligonucleotide
gcccagugagcgaggacugcagcgu

SEQ ID NO: 3287 - RNA, 25 nt, Artificial Sequence
  Synthetic Oligonucleotide
ugcccagugagcgaggacugcagcg

SEQ ID NO: 3288 - RNA, 25 nt, Artificial Sequence
  Synthetic Oligonucleotide
cgugcccagugagcgaggacugcag

SEQ ID NO: 3289 - RNA, 25 nt, Artificial Sequence
  Synthetic Oligonucleotide
cagugagcgaggacugcagcguaga

SEQ ID NO: 3290 - RNA, 25 nt, Artificial Sequence
  Synthetic Oligonucleotide
ccagugagcgaggacugcagcguag

SEQ ID NO: 3291 - RNA, 25 nt, Artificial Sequence
  Synthetic Oligonucleotide
aggcuauggagcaaauggcuggauc

SEQ ID NO: 3292 - RNA, 25 nt, Artificial Sequence
  Synthetic Oligonucleotide
aaggcuauggagcaaauggcuggau

SEQ ID NO: 3293 - RNA, 25 nt, Artificial Sequence
  Synthetic Oligonucleotide
uaaggcuauggagcaaauggcugga

SEQ ID NO: 3294 - RNA, 25 nt, Artificial Sequence
  Synthetic Oligonucleotide
ugcacuugauauuguggauucuuga

SEQ ID NO: 3295 - RNA, 25 nt, Artificial Sequence
  Synthetic Oligonucleotide
cacuugauauuguggauucuugauc

SEQ ID NO: 3296 - RNA, 25 nt, Artificial Sequence
  Synthetic Oligonucleotide
gcacuugauauuguggauucuugau

SEQ ID NO: 3297 - RNA, 25 nt, Artificial Sequence
  Synthetic Oligonucleotide
uugcacuugauauuguggauucuug

SEQ ID NO: 3298 - RNA, 25 nt, Artificial Sequence
  Synthetic Oligonucleotide
acuugauauuguggauucuugaucg

SEQ ID NO: 3299 - RNA, 25 nt, Artificial Sequence
  Synthetic Oligonucleotide
agcgaggacugcagcguagacgcuu

SEQ ID NO: 3300 - RNA, 25 nt, Artificial Sequence
  Synthetic Oligonucleotide
cgaggacugcagcguagacgcuuug

SEQ ID NO: 3301 - RNA, 25 nt, Artificial Sequence
  Synthetic Oligonucleotide
gaggacugcagcguagacgcuuugu

SEQ ID NO: 3302 - RNA, 25 nt, Artificial Sequence
  Synthetic Oligonucleotide
gagcgaggacugcagcguagacgcu

SEQ ID NO: 3303 - RNA, 25 nt, Artificial Sequence
  Synthetic Oligonucleotide
ugagcgaggacugcagcguagacgc

SEQ ID NO: 3304 - RNA, 25 nt, Artificial Sequence
  Synthetic Oligonucleotide
gcgaggacugcagcguagacgcuuu

SEQ ID NO: 3305 - RNA, 25 nt, Artificial Sequence
  Synthetic Oligonucleotide
ggauucuugaucgucuuuuuuucaa

SEQ ID NO: 3306 - RNA, 25 nt, Artificial Sequence
  Synthetic Oligonucleotide
auucuugaucgucuuuuuuucaaau

SEQ ID NO: 3307 - RNA, 25 nt, Artificial Sequence
  Synthetic Oligonucleotide
uggauucuugaucgucuuuuuuuca

SEQ ID NO: 3308 - RNA, 25 nt, Artificial Sequence
  Synthetic Oligonucleotide
gauucuugaucgucuuuuuuucaaa

SEQ ID NO: 3309 - RNA, 25 nt, Artificial Sequence
  Synthetic Oligonucleotide
uucuugaucgucuuuuuuucaaaug

SEQ ID NO: 3310 - RNA, 25 nt, Artificial Sequence
  Synthetic Oligonucleotide
uguggauucuugaucgucuuuuuuu

SEQ ID NO: 3311 - RNA, 25 nt, Artificial Sequence
  Synthetic Oligonucleotide
guggauucuugaucgucuuuuuuuc

SEQ ID NO: 3312 - RNA, 25 nt, Artificial Sequence
  Synthetic Oligonucleotide
ucuugaucgucuuuuuuucaaaugc

SEQ ID NO: 3313 - RNA, 25 nt, Artificial Sequence
  Synthetic Oligonucleotide
ugugaacagauugcugacucccagc

SEQ ID NO: 3314 - RNA, 25 nt, Artificial Sequence
  Synthetic Oligonucleotide
gugaacagauugcugacucccagca

SEQ ID NO: 3315 - RNA, 25 nt, Artificial Sequence
  Synthetic Oligonucleotide
aggacugcagcguagacgcuuuguc

SEQ ID NO: 3316 - RNA, 25 nt, Artificial Sequence
  Synthetic Oligonucleotide
uauuguggauucuugaucgucuuuu

SEQ ID NO: 3317 - RNA, 25 nt, Artificial Sequence
  Synthetic Oligonucleotide
auauuguggauucuugaucgucuuu

SEQ ID NO: 3318 - RNA, 25 nt, Artificial Sequence
  Synthetic Oligonucleotide
ugauauuguggauucuugaucgucu

SEQ ID NO: 3319 - RNA, 25 nt, Artificial Sequence
  Synthetic Oligonucleotide
gauauuguggauucuugaucgucuu

SEQ ID NO: 3320 - RNA, 25 nt, Artificial Sequence
  Synthetic Oligonucleotide
uugauauuguggauucuugaucguc

SEQ ID NO: 3321 - RNA, 25 nt, Artificial Sequence
  Synthetic Oligonucleotide
cuugauauuguggauucuugaucgu

SEQ ID NO: 3322 - RNA, 25 nt, Artificial Sequence
  Synthetic Oligonucleotide
agaugaucuucuugaaaauuugcag

SEQ ID NO: 3323 - RNA, 25 nt, Artificial Sequence
  Synthetic Oligonucleotide
acacagaucuugaggcucucaugga

SEQ ID NO: 3324 - RNA, 25 nt, Artificial Sequence
  Synthetic Oligonucleotide
aacacagaucuugaggcucucaugg

SEQ ID NO: 3325 - RNA, 25 nt, Artificial Sequence
  Synthetic Oligonucleotide
gggaagaauaucgaaaggaacagca

SEQ ID NO: 3326 - RNA, 25 nt, Artificial Sequence
  Synthetic Oligonucleotide
agggaagaauaucgaaaggaacagc

SEQ ID NO: 3327 - RNA, 25 nt, Artificial Sequence
  Synthetic Oligonucleotide
ugagggaagaauaucgaaaggaaca

SEQ ID NO: 3328 - RNA, 25 nt, Artificial Sequence
  Synthetic Oligonucleotide
gagggaagaauaucgaaaggaacag

SEQ ID NO: 3329 - RNA, 25 nt, Artificial Sequence
  Synthetic Oligonucleotide
agucuaugagggaagaauaucgaaa

SEQ ID NO: 3330 - RNA, 25 nt, Artificial Sequence
  Synthetic Oligonucleotide
ggaagaauaucgaaaggaacagcag

SEQ ID NO: 3331 - RNA, 25 nt, Artificial Sequence
  Synthetic Oligonucleotide
cagaucuugaggcucucauggaaug

SEQ ID NO: 3332 - RNA, 25 nt, Artificial Sequence
  Synthetic Oligonucleotide
gaagaauaucgaaaggaacagcaga

SEQ ID NO: 3333 - RNA, 25 nt, Artificial Sequence
  Synthetic Oligonucleotide
agaucuugaggcucucauggaaugg

SEQ ID NO: 3334 - RNA, 25 nt, Artificial Sequence
  Synthetic Oligonucleotide
augagggaagaauaucgaaaggaac

SEQ ID NO: 3335 - RNA, 25 nt, Artificial Sequence
  Synthetic Oligonucleotide
cacagaucuugaggcucucauggaa

SEQ ID NO: 3336 - RNA, 25 nt, Artificial Sequence
  Synthetic Oligonucleotide
acagaucuugaggcucucauggaau

SEQ ID NO: 3337 - RNA, 25 nt, Artificial Sequence
  Synthetic Oligonucleotide
aguaucauugggaucuugcacuuga

SEQ ID NO: 3338 - RNA, 25 nt, Artificial Sequence
  Synthetic Oligonucleotide
ucuaugagggaagaauaucgaaagg

SEQ ID NO: 3339 - RNA, 25 nt, Artificial Sequence
  Synthetic Oligonucleotide
guaucauugggaucuugcacuugau

SEQ ID NO: 3340 - RNA, 25 nt, Artificial Sequence
  Synthetic Oligonucleotide
gucuaugagggaagaauaucgaaag

SEQ ID NO: 3341 - RNA, 25 nt, Artificial Sequence
  Synthetic Oligonucleotide
cuaugagggaagaauaucgaaagga

SEQ ID NO: 3342 - RNA, 25 nt, Artificial Sequence
  Synthetic Oligonucleotide
aaagagggccuucuacggaaggagu

SEQ ID NO: 3343 - RNA, 25 nt, Artificial Sequence
  Synthetic Oligonucleotide
aaaagagggccuucuacggaaggag

SEQ ID NO: 3344 - RNA, 25 nt, Artificial Sequence
  Synthetic Oligonucleotide
uaugagggaagaauaucgaaaggaa

SEQ ID NO: 3345 - RNA, 25 nt, Artificial Sequence
  Synthetic Oligonucleotide
gagucuaugagggaagaauaucgaa

SEQ ID NO: 3346 - RNA, 25 nt, Artificial Sequence
  Synthetic Oligonucleotide
cuugcacuugauauuguggauucuu

SEQ ID NO: 3347 - RNA, 25 nt, Artificial Sequence
  Synthetic Oligonucleotide
ucuugcacuugauauuguggauucu

SEQ ID NO: 3348 - RNA, 25 nt, Artificial Sequence
  Synthetic Oligonucleotide
aucuugcacuugauauuguggauuc

SEQ ID NO: 3349 - RNA, 25 nt, Artificial Sequence
  Synthetic Oligonucleotide
uagacgcuuuguccaaaaugcccuc

SEQ ID NO: 3350 - RNA, 25 nt, Artificial Sequence
  Synthetic Oligonucleotide
agacgcuuuguccaaaaugcccuca

SEQ ID NO: 3351 - RNA, 25 nt, Artificial Sequence
  Synthetic Oligonucleotide
gacgcuuuguccaaaaugcccucaa

SEQ ID NO: 3352 - RNA, 25 nt, Artificial Sequence
  Synthetic Oligonucleotide
guccaaaaugcccucaaugggaaug

SEQ ID NO: 3353 - RNA, 25 nt, Artificial Sequence
  Synthetic Oligonucleotide
uccaaaaugcccucaaugggaaugg

SEQ ID NO: 3354 - RNA, 25 nt, Artificial Sequence
  Synthetic Oligonucleotide
uuuguccaaaaugcccucaauggga

SEQ ID NO: 3355 - RNA, 25 nt, Artificial Sequence
  Synthetic Oligonucleotide
uguccaaaaugcccucaaugggaau

SEQ ID NO: 3356 - RNA, 25 nt, Artificial Sequence
  Synthetic Oligonucleotide
uuguccaaaaugcccucaaugggaa

SEQ ID NO: 3357 - RNA, 25 nt, Artificial Sequence
  Synthetic Oligonucleotide
gcuuuguccaaaaugcccucaaugg

SEQ ID NO: 3358 - RNA, 25 nt, Artificial Sequence
  Synthetic Oligonucleotide
acgcuuuguccaaaaugcccucaau

SEQ ID NO: 3359 - RNA, 25 nt, Artificial Sequence
  Synthetic Oligonucleotide
cgcuuuguccaaaaugcccucaaug

SEQ ID NO: 3360 - RNA, 25 nt, Artificial Sequence
  Synthetic Oligonucleotide
gggaucuugcacuugauauugugga

SEQ ID NO: 3361 - RNA, 25 nt, Artificial Sequence
  Synthetic Oligonucleotide
cuucuacggaaggaguaccugaguc

SEQ ID NO: 3362 - RNA, 25 nt, Artificial Sequence
  Synthetic Oligonucleotide
cuuuguccaaaaugcccucaauggg

SEQ ID NO: 3363 - RNA, 25 nt, Artificial Sequence
  Synthetic Oligonucleotide
ccuucuacggaaggaguaccugagu

SEQ ID NO: 3364 - RNA, 25 nt, Artificial Sequence
  Synthetic Oligonucleotide
gaucuugcacuugauauuguggauu

SEQ ID NO: 3365 - RNA, 25 nt, Artificial Sequence
  Synthetic Oligonucleotide
uucuacggaaggaguaccugagucu

SEQ ID NO: 3366 - RNA, 25 nt, Artificial Sequence
  Synthetic Oligonucleotide
aagacaagaccaauccugucaccuc

SEQ ID NO: 3367 - RNA, 25 nt, Artificial Sequence
  Synthetic Oligonucleotide
ggaucuugcacuugauauuguggau

SEQ ID NO: 3368 - RNA, 25 nt, Artificial Sequence
  Synthetic Oligonucleotide
agacaagaccaauccugucaccucu

SEQ ID NO: 3369 - RNA, 25 nt, Artificial Sequence
  Synthetic Oligonucleotide
aaggaguaccugagucuaugaggga

SEQ ID NO: 3370 - RNA, 25 nt, Artificial Sequence
  Synthetic Oligonucleotide
gaaggaguaccugagucuaugaggg

SEQ ID NO: 3371 - RNA, 25 nt, Artificial Sequence
  Synthetic Oligonucleotide
acggaaggaguaccugagucuauga

SEQ ID NO: 3372 - RNA, 25 nt, Artificial Sequence
  Synthetic Oligonucleotide
ggaaggaguaccugagucuaugagg

SEQ ID NO: 3373 - RNA, 25 nt, Artificial Sequence
  Synthetic Oligonucleotide
cggaaggaguaccugagucuaugag

SEQ ID NO: 3374 - RNA, 25 nt, Artificial Sequence
  Synthetic Oligonucleotide
ggaguaccugagucuaugagggaag

SEQ ID NO: 3375 - RNA, 25 nt, Artificial Sequence
  Synthetic Oligonucleotide
gaguaccugagucuaugagggaaga

SEQ ID NO: 3376 - RNA, 25 nt, Artificial Sequence
  Synthetic Oligonucleotide
uccugucaccucugacuaaggggau

SEQ ID NO: 3377 - RNA, 25 nt, Artificial Sequence
  Synthetic Oligonucleotide
uacggaaggaguaccugagucuaug

SEQ ID NO: 3378 - RNA, 25 nt, Artificial Sequence
  Synthetic Oligonucleotide
auccugucaccucugacuaagggga

SEQ ID NO: 3379 - RNA, 25 nt, Artificial Sequence
  Synthetic Oligonucleotide
ucuacggaaggaguaccugagucua

SEQ ID NO: 3380 - RNA, 25 nt, Artificial Sequence
  Synthetic Oligonucleotide
cuacggaaggaguaccugagucuau

SEQ ID NO: 3381 - RNA, 25 nt, Artificial Sequence
  Synthetic Oligonucleotide
aggaguaccugagucuaugagggaa

SEQ ID NO: 3382 - RNA, 25 nt, Artificial Sequence
  Synthetic Oligonucleotide
ugggaucuugcacuugauauugugg

SEQ ID NO: 3383 - RNA, 25 nt, Artificial Sequence
  Synthetic Oligonucleotide
uugggaucuugcacuugauauugug

SEQ ID NO: 3384 - RNA, 25 nt, Artificial Sequence
  Synthetic Oligonucleotide
ccugucaccucugacuaaggggauu

SEQ ID NO: 3385 - RNA, 25 nt, Artificial Sequence
  Synthetic Oligonucleotide
acaagaccaauccugucaccucuga

SEQ ID NO: 3386 - RNA, 25 nt, Artificial Sequence
  Synthetic Oligonucleotide
caagaccaauccugucaccucugac

SEQ ID NO: 3387 - RNA, 25 nt, Artificial Sequence
  Synthetic Oligonucleotide
gacaagaccaauccugucaccucug

SEQ ID NO: 3388 - RNA, 25 nt, Artificial Sequence
  Synthetic Oligonucleotide
auugggaucuugcacuugauauugu

SEQ ID NO: 3389 - RNA, 25 nt, Artificial Sequence
  Synthetic Oligonucleotide
ccaggcaaauggugcaggcaaugag

SEQ ID NO: 3390 - RNA, 25 nt, Artificial Sequence
  Synthetic Oligonucleotide
cugagucuaugagggaagaauaucg

SEQ ID NO: 3391 - RNA, 25 nt, Artificial Sequence
  Synthetic Oligonucleotide
agacuugaagaugucuuugcuggga

SEQ ID NO: 3392 - RNA, 25 nt, Artificial Sequence
  Synthetic Oligonucleotide
ucauugggaucuugcacuugauauu

SEQ ID NO: 3393 - RNA, 25 nt, Artificial Sequence
  Synthetic Oligonucleotide
gccaggcaaauggugcaggcaauga

SEQ ID NO: 3394 - RNA, 25 nt, Artificial Sequence
  Synthetic Oligonucleotide
ggggugcagaugcaacgauucaagu

SEQ ID NO: 3395 - RNA, 25 nt, Artificial Sequence
  Synthetic Oligonucleotide
gggggugcagaugcaacgauucaag

SEQ ID NO: 3396 - RNA, 25 nt, Artificial Sequence
  Synthetic Oligonucleotide
gagacuugaagaugucuuugcuggg

SEQ ID NO: 3397 - RNA, 25 nt, Artificial Sequence
  Synthetic Oligonucleotide
ccugagucuaugagggaagaauauc

SEQ ID NO: 3398 - RNA, 25 nt, Artificial Sequence
  Synthetic Oligonucleotide
gacuugaagaugucuuugcugggaa

SEQ ID NO: 3399 - RNA, 25 nt, Artificial Sequence
  Synthetic Oligonucleotide
ggccaggcaaauggugcaggcaaug

SEQ ID NO: 3400 - RNA, 25 nt, Artificial Sequence
  Synthetic Oligonucleotide
aggccaggcaaauggugcaggcaau

SEQ ID NO: 3401 - RNA, 25 nt, Artificial Sequence
  Synthetic Oligonucleotide
aucauugggaucuugcacuugauau

SEQ ID NO: 3402 - RNA, 25 nt, Artificial Sequence
  Synthetic Oligonucleotide
cauugggaucuugcacuugauauug

SEQ ID NO: 3403 - RNA, 25 nt, Artificial Sequence
  Synthetic Oligonucleotide
uugcuagucaggccaggcaaauggu

SEQ ID NO: 3404 - RNA, 25 nt, Artificial Sequence
  Synthetic Oligonucleotide
gagggccuucuacggaaggaguacc

SEQ ID NO: 3405 - RNA, 25 nt, Artificial Sequence
  Synthetic Oligonucleotide
gugcacuugccaguugcaugggccu

SEQ ID NO: 3406 - RNA, 25 nt, Artificial Sequence
  Synthetic Oligonucleotide
ggugcacuugccaguugcaugggcc

SEQ ID NO: 3407 - RNA, 25 nt, Artificial Sequence
  Synthetic Oligonucleotide
cuggugcacuugccaguugcauggg

SEQ ID NO: 3408 - RNA, 25 nt, Artificial Sequence
  Synthetic Oligonucleotide
ccaguugcaugggccucauauacaa

SEQ ID NO: 3409 - RNA, 25 nt, Artificial Sequence
  Synthetic Oligonucleotide
gccaguugcaugggccucauauaca

SEQ ID NO: 3410 - RNA, 25 nt, Artificial Sequence
  Synthetic Oligonucleotide
uugccaguugcaugggccucauaua

SEQ ID NO: 3411 - RNA, 25 nt, Artificial Sequence
  Synthetic Oligonucleotide
cuugccaguugcaugggccucauau

SEQ ID NO: 3412 - RNA, 25 nt, Artificial Sequence
  Synthetic Oligonucleotide
gucaggccaggcaaauggugcaggc

SEQ ID NO: 3413 - RNA, 25 nt, Artificial Sequence
  Synthetic Oligonucleotide
cuagucaggccaggcaaauggugca

SEQ ID NO: 3414 - RNA, 25 nt, Artificial Sequence
  Synthetic Oligonucleotide
caggccaggcaaauggugcaggcaa

SEQ ID NO: 3415 - RNA, 25 nt, Artificial Sequence
  Synthetic Oligonucleotide
uaccugagucuaugagggaagaaua

SEQ ID NO: 3416 - RNA, 25 nt, Artificial Sequence
  Synthetic Oligonucleotide
uggugcacuugccaguugcaugggc

SEQ ID NO: 3417 - RNA, 25 nt, Artificial Sequence
  Synthetic Oligonucleotide
agucaggccaggcaaauggugcagg

SEQ ID NO: 3418 - RNA, 25 nt, Artificial Sequence
  Synthetic Oligonucleotide
agagggccuucuacggaaggaguac

SEQ ID NO: 3419 - RNA, 25 nt, Artificial Sequence
  Synthetic Oligonucleotide
gcuagucaggccaggcaaauggugc

SEQ ID NO: 3420 - RNA, 25 nt, Artificial Sequence
  Synthetic Oligonucleotide
ugccaguugcaugggccucauauac

SEQ ID NO: 3421 - RNA, 25 nt, Artificial Sequence
  Synthetic Oligonucleotide
ugcuggugcacuugccaguugcaug

SEQ ID NO: 3422 - RNA, 25 nt, Artificial Sequence
  Synthetic Oligonucleotide
cugcuggugcacuugccaguugcau

SEQ ID NO: 3423 - RNA, 25 nt, Artificial Sequence
  Synthetic Oligonucleotide
gcuggugcacuugccaguugcaugg

SEQ ID NO: 3424 - RNA, 25 nt, Artificial Sequence
  Synthetic Oligonucleotide
ucugcuggugcacuugccaguugca

SEQ ID NO: 3425 - RNA, 25 nt, Artificial Sequence
  Synthetic Oligonucleotide
aagagggccuucuacggaaggagua

SEQ ID NO: 3426 - RNA, 25 nt, Artificial Sequence
  Synthetic Oligonucleotide
ugcuagucaggccaggcaaauggug

SEQ ID NO: 3427 - RNA, 25 nt, Artificial Sequence
  Synthetic Oligonucleotide
accugagucuaugagggaagaauau

SEQ ID NO: 3428 - RNA, 25 nt, Artificial Sequence
  Synthetic Oligonucleotide
uagucaggccaggcaaauggugcag

SEQ ID NO: 3429 - RNA, 25 nt, Artificial Sequence
  Synthetic Oligonucleotide
aagaccaauccugucaccucugacu

SEQ ID NO: 3430 - RNA, 25 nt, Artificial Sequence
  Synthetic Oligonucleotide
agaccaauccugucaccucugacua

SEQ ID NO: 3431 - RNA, 25 nt, Artificial Sequence
  Synthetic Oligonucleotide
cacuugccaguugcaugggccucau

SEQ ID NO: 3432 - RNA, 25 nt, Artificial Sequence
  Synthetic Oligonucleotide
ugagucuaugagggaagaauaucga

SEQ ID NO: 3433 - RNA, 25 nt, Artificial Sequence
  Synthetic Oligonucleotide
ucaggccaggcaaauggugcaggca

SEQ ID NO: 3434 - RNA, 25 nt, Artificial Sequence
  Synthetic Oligonucleotide
gcacuugccaguugcaugggccuca

SEQ ID NO: 3435 - RNA, 25 nt, Artificial Sequence
  Synthetic Oligonucleotide
uaaagacaagaccaauccugucacc

SEQ ID NO: 3436 - RNA, 25 nt, Artificial Sequence
  Synthetic Oligonucleotide
ugcacuugccaguugcaugggccuc

SEQ ID NO: 3437 - RNA, 25 nt, Artificial Sequence
  Synthetic Oligonucleotide
gaccaauccugucaccucugacuaa

SEQ ID NO: 3438 - RNA, 25 nt, Artificial Sequence
  Synthetic Oligonucleotide
ggcuaaagacaagaccaauccuguc

SEQ ID NO: 3439 - RNA, 25 nt, Artificial Sequence
  Synthetic Oligonucleotide
aaagacaagaccaauccugucaccu

SEQ ID NO: 3440 - RNA, 25 nt, Artificial Sequence
  Synthetic Oligonucleotide
uggcuaaagacaagaccaauccugu

SEQ ID NO: 3441 - RNA, 25 nt, Artificial Sequence
  Synthetic Oligonucleotide
guaccugagucuaugagggaagaau

SEQ ID NO: 3442 - RNA, 25 nt, Artificial Sequence
  Synthetic Oligonucleotide
gggugcagaugcaacgauucaagug

SEQ ID NO: 3443 - RNA, 25 nt, Artificial Sequence
  Synthetic Oligonucleotide
ggugcagaugcaacgauucaaguga

SEQ ID NO: 3444 - RNA, 25 nt, Artificial Sequence
  Synthetic Oligonucleotide
acuugccaguugcaugggccucaua

SEQ ID NO: 3445 - RNA, 25 nt, Artificial Sequence
  Synthetic Oligonucleotide
cuaaagacaagaccaauccugucac

SEQ ID NO: 3446 - RNA, 25 nt, Artificial Sequence
  Synthetic Oligonucleotide
gcuaaagacaagaccaauccuguca

SEQ ID NO: 3447 - RNA, 25 nt, Artificial Sequence
  Synthetic Oligonucleotide
uucugcuggugcacuugccaguugc

SEQ ID NO: 3448 - RNA, 25 nt, Artificial Sequence
  Synthetic Oligonucleotide
acauuccauggggccaaagaaauag

SEQ ID NO: 3449 - RNA, 25 nt, Artificial Sequence
  Synthetic Oligonucleotide
cauuccauggggccaaagaaauagc

SEQ ID NO: 3450 - RNA, 25 nt, Artificial Sequence
  Synthetic Oligonucleotide
aguaccugagucuaugagggaagaa

SEQ ID NO: 3451 - RNA, 25 nt, Artificial Sequence
  Synthetic Oligonucleotide
aggucgaaacguauguucucucuau

SEQ ID NO: 3452 - RNA, 25 nt, Artificial Sequence
  Synthetic Oligonucleotide
gaggucgaaacguauguucucucua

SEQ ID NO: 3453 - RNA, 25 nt, Artificial Sequence
  Synthetic Oligonucleotide
uugaauggaaugauaacacaguucg

SEQ ID NO: 3454 - RNA, 25 nt, Artificial Sequence
  Synthetic Oligonucleotide
cuugaauggaaugauaacacaguuc

SEQ ID NO: 3455 - RNA, 25 nt, Artificial Sequence
  Synthetic Oligonucleotide
ugaauggaaugauaacacaguucga

SEQ ID NO: 3456 - RNA, 25 nt, Artificial Sequence
  Synthetic Oligonucleotide
gaauggaaugauaacacaguucgag

SEQ ID NO: 3457 - RNA, 25 nt, Artificial Sequence
  Synthetic Oligonucleotide
aauggaaugauaacacaguucgagu

SEQ ID NO: 3458 - RNA, 25 nt, Artificial Sequence
  Synthetic Oligonucleotide
auggaaugauaacacaguucgaguc

SEQ ID NO: 3459 - RNA, 25 nt, Artificial Sequence
  Synthetic Oligonucleotide
gaaugauaacacaguucgagucucu

SEQ ID NO: 3460 - RNA, 25 nt, Artificial Sequence
  Synthetic Oligonucleotide
uggaaugauaacacaguucgagucu

SEQ ID NO: 3461 - RNA, 25 nt, Artificial Sequence
  Synthetic Oligonucleotide
ggaaugauaacacaguucgagucuc

SEQ ID NO: 3462 - RNA, 25 nt, Artificial Sequence
  Synthetic Oligonucleotide
ugaggaugucaaaaaugcaauuggg

SEQ ID NO: 3463 - RNA, 25 nt, Artificial Sequence
  Synthetic Oligonucleotide
cuugaucggcuucgccgagaucaga

SEQ ID NO: 3464 - RNA, 25 nt, Artificial Sequence
  Synthetic Oligonucleotide
augucaaaaaugcaauugggguccu

SEQ ID NO: 3465 - RNA, 25 nt, Artificial Sequence
  Synthetic Oligonucleotide
aggaugucaaaaaugcaauuggggu

SEQ ID NO: 3466 - RNA, 25 nt, Artificial Sequence
  Synthetic Oligonucleotide
ugucaaaaaugcaauugggguccuc

SEQ ID NO: 3467 - RNA, 25 nt, Artificial Sequence
  Synthetic Oligonucleotide
ggaugucaaaaaugcaauugggguc

SEQ ID NO: 3468 - RNA, 25 nt, Artificial Sequence
  Synthetic Oligonucleotide
gaugucaaaaaugcaauuggggucc

SEQ ID NO: 3469 - RNA, 25 nt, Artificial Sequence
  Synthetic Oligonucleotide
gucaaaaaugcaauugggguccuca

SEQ ID NO: 3470 - RNA, 25 nt, Artificial Sequence
  Synthetic Oligonucleotide
ucaaaaaugcaauugggguccucau

SEQ ID NO: 3471 - RNA, 25 nt, Artificial Sequence
  Synthetic Oligonucleotide
caaaaaugcaauugggguccucauc

SEQ ID NO: 3472 - RNA, 25 nt, Artificial Sequence
  Synthetic Oligonucleotide
gaggaugucaaaaaugcaauugggg

SEQ ID NO: 3473 - RNA, 25 nt, Artificial Sequence
  Synthetic Oligonucleotide
aaaaaugcaauugggguccucaucg

SEQ ID NO: 3474 - RNA, 25 nt, Artificial Sequence
  Synthetic Oligonucleotide
aaaaugcaauugggguccucaucgg

SEQ ID NO: 3475 - RNA, 25 nt, Artificial Sequence
  Synthetic Oligonucleotide
aagagggagcaauuguuggcgaaau

SEQ ID NO: 3476 - RNA, 25 nt, Artificial Sequence
  Synthetic Oligonucleotide
gaagagggagcaauuguuggcgaaa

SEQ ID NO: 3477 - RNA, 25 nt, Artificial Sequence
  Synthetic Oligonucleotide
ucaccgaagagggagcaauuguugg

SEQ ID NO: 3478 - RNA, 25 nt, Artificial Sequence
  Synthetic Oligonucleotide
accgaagagggagcaauuguuggcg

SEQ ID NO: 3479 - RNA, 25 nt, Artificial Sequence
  Synthetic Oligonucleotide
caccgaagagggagcaauuguuggc

SEQ ID NO: 3480 - RNA, 25 nt, Artificial Sequence
  Synthetic Oligonucleotide
ccgaagagggagcaauuguuggcga

SEQ ID NO: 3481 - RNA, 25 nt, Artificial Sequence
  Synthetic Oligonucleotide
uucaccgaagagggagcaauuguug

SEQ ID NO: 3482 - RNA, 25 nt, Artificial Sequence
  Synthetic Oligonucleotide
cgaagagggagcaauuguuggcgaa

SEQ ID NO: 3483 - RNA, 25 nt, Artificial Sequence
  Synthetic Oligonucleotide
uacuaagggcuuucaccgaagaggg

SEQ ID NO: 3484 - RNA, 25 nt, Artificial Sequence
  Synthetic Oligonucleotide
gcuuucaccgaagagggagcaauug

SEQ ID NO: 3485 - RNA, 25 nt, Artificial Sequence
  Synthetic Oligonucleotide
cuuucaccgaagagggagcaauugu

SEQ ID NO: 3486 - RNA, 25 nt, Artificial Sequence
  Synthetic Oligonucleotide
cuaagggcuuucaccgaagagggag

SEQ ID NO: 3487 - RNA, 25 nt, Artificial Sequence
  Synthetic Oligonucleotide
ggcuuucaccgaagagggagcaauu

SEQ ID NO: 3488 - RNA, 25 nt, Artificial Sequence
  Synthetic Oligonucleotide
uuucaccgaagagggagcaauuguu

SEQ ID NO: 3489 - RNA, 25 nt, Artificial Sequence
  Synthetic Oligonucleotide
aagggcuuucaccgaagagggagca

SEQ ID NO: 3490 - RNA, 25 nt, Artificial Sequence
  Synthetic Oligonucleotide
uuacuaagggcuuucaccgaagagg

SEQ ID NO: 3491 - RNA, 25 nt, Artificial Sequence
  Synthetic Oligonucleotide
gggcuuucaccgaagagggagcaau

SEQ ID NO: 3492 - RNA, 25 nt, Artificial Sequence
  Synthetic Oligonucleotide
agggcuuucaccgaagagggagcaa

SEQ ID NO: 3493 - RNA, 25 nt, Artificial Sequence
  Synthetic Oligonucleotide
uaagggcuuucaccgaagagggagc

SEQ ID NO: 3494 - RNA, 25 nt, Artificial Sequence
  Synthetic Oligonucleotide
acuaagggcuuucaccgaagaggga

SEQ ID NO: 3495 - RNA, 25 nt, Artificial Sequence
  Synthetic Oligonucleotide
uccuugaucggcuucgccgagauca

SEQ ID NO: 3496 - RNA, 25 nt, Artificial Sequence
  Synthetic Oligonucleotide
uuccuugaucggcuucgccgagauc

SEQ ID NO: 3497 - RNA, 25 nt, Artificial Sequence
  Synthetic Oligonucleotide
ccuugaucggcuucgccgagaucag

SEQ ID NO: 3498 - RNA, 25 nt, Artificial Sequence
  Synthetic Oligonucleotide
auuacuaagggcuuucaccgaagag

SEQ ID NO: 3499 - RNA, 25 nt, Artificial Sequence
  Synthetic Oligonucleotide
acagagauucgcuuggagaagcagu

SEQ ID NO: 3500 - RNA, 25 nt, Artificial Sequence
  Synthetic Oligonucleotide
uacagagauucgcuuggagaagcag

SEQ ID NO: 3501 - RNA, 25 nt, Artificial Sequence
  Synthetic Oligonucleotide
ucuacagagauucgcuuggagaagc

SEQ ID NO: 3502 - RNA, 25 nt, Artificial Sequence
  Synthetic Oligonucleotide
cuacagagauucgcuuggagaagca

SEQ ID NO: 3503 - RNA, 25 nt, Artificial Sequence
  Synthetic Oligonucleotide
cagagauucgcuuggagaagcagua

SEQ ID NO: 3504 - RNA, 25 nt, Artificial Sequence
  Synthetic Oligonucleotide
auucgcuuggagaagcaguaaugag

SEQ ID NO: 3505 - RNA, 25 nt, Artificial Sequence
  Synthetic Oligonucleotide
gauucgcuuggagaagcaguaauga

SEQ ID NO: 3506 - RNA, 25 nt, Artificial Sequence
  Synthetic Oligonucleotide
agauucgcuuggagaagcaguaaug

SEQ ID NO: 3507 - RNA, 25 nt, Artificial Sequence
  Synthetic Oligonucleotide
agagauucgcuuggagaagcaguaa

SEQ ID NO: 3508 - RNA, 25 nt, Artificial Sequence
  Synthetic Oligonucleotide
gagauucgcuuggagaagcaguaau

SEQ ID NO: 3509 - RNA, 25 nt, Artificial Sequence
  Synthetic Oligonucleotide
uucgcuuggagaagcaguaaugaga

SEQ ID NO: 3510 - RNA, 25 nt, Artificial Sequence
  Synthetic Oligonucleotide
auaagauggcugauugaagaaguga

SEQ ID NO: 3511 - RNA, 25 nt, Artificial Sequence
  Synthetic Oligonucleotide
uaagauggcugauugaagaagugag

SEQ ID NO: 3512 - RNA, 25 nt, Artificial Sequence
  Synthetic Oligonucleotide
augauaacacaguucgagucucuaa

SEQ ID NO: 3513 - RNA, 25 nt, Artificial Sequence
  Synthetic Oligonucleotide
aaugauaacacaguucgagucucua

SEQ ID NO: 3514 - RNA, 25 nt, Artificial Sequence
  Synthetic Oligonucleotide
ugauaacacaguucgagucucuaaa

SEQ ID NO: 3515 - RNA, 25 nt, Artificial Sequence
  Synthetic Oligonucleotide
gauaacacaguucgagucucuaaaa

SEQ ID NO: 3516 - RNA, 25 nt, Artificial Sequence
  Synthetic Oligonucleotide
gaugaggcacuuaaaaugaccaugg

SEQ ID NO: 3517 - RNA, 25 nt, Artificial Sequence
  Synthetic Oligonucleotide
cauuccuugaucggcuucgccgaga

SEQ ID NO: 3518 - RNA, 25 nt, Artificial Sequence
  Synthetic Oligonucleotide
ccauuccuugaucggcuucgccgag

SEQ ID NO: 3519 - RNA, 25 nt, Artificial Sequence
  Synthetic Oligonucleotide
augcaauugggguccucaucggagg

SEQ ID NO: 3520 - RNA, 25 nt, Artificial Sequence
  Synthetic Oligonucleotide
aaaugcaauugggguccucaucgga

SEQ ID NO: 3521 - RNA, 25 nt, Artificial Sequence
  Synthetic Oligonucleotide
auuccuugaucggcuucgccgagau

SEQ ID NO: 3522 - RNA, 25 nt, Artificial Sequence
  Synthetic Oligonucleotide
aaugcaauugggguccucaucggag

SEQ ID NO: 3523 - RNA, 25 nt, Artificial Sequence
  Synthetic Oligonucleotide
uauuacuaagggcuuucaccgaaga

SEQ ID NO: 3524 - RNA, 25 nt, Artificial Sequence
  Synthetic Oligonucleotide
aggacauacuauugaggaugucaaa

SEQ ID NO: 3525 - RNA, 25 nt, Artificial Sequence
  Synthetic Oligonucleotide
caggacauacuauugaggaugucaa

SEQ ID NO: 3526 - RNA, 25 nt, Artificial Sequence
  Synthetic Oligonucleotide
uuccaggacauacuauugaggaugu

SEQ ID NO: 3527 - RNA, 25 nt, Artificial Sequence
  Synthetic Oligonucleotide
ggacauacuauugaggaugucaaaa

SEQ ID NO: 3528 - RNA, 25 nt, Artificial Sequence
  Synthetic Oligonucleotide
ccaggacauacuauugaggauguca

SEQ ID NO: 3529 - RNA, 25 nt, Artificial Sequence
  Synthetic Oligonucleotide
uccaggacauacuauugaggauguc

SEQ ID NO: 3530 - RNA, 25 nt, Artificial Sequence
  Synthetic Oligonucleotide
cauacuauugaggaugucaaaaaug

SEQ ID NO: 3531 - RNA, 25 nt, Artificial Sequence
  Synthetic Oligonucleotide
auacuauugaggaugucaaaaaugc

SEQ ID NO: 3532 - RNA, 25 nt, Artificial Sequence
  Synthetic Oligonucleotide
acauacuauugaggaugucaaaaau

SEQ ID NO: 3533 - RNA, 25 nt, Artificial Sequence
  Synthetic Oligonucleotide
gacauacuauugaggaugucaaaaa

SEQ ID NO: 3534 - RNA, 25 nt, Artificial Sequence
  Synthetic Oligonucleotide
acugguucaugcuaaugcccaagca

SEQ ID NO: 3535 - RNA, 25 nt, Artificial Sequence
  Synthetic Oligonucleotide
uugaggaugucaaaaaugcaauugg

SEQ ID NO: 3536 - RNA, 25 nt, Artificial Sequence
  Synthetic Oligonucleotide
uacuauugaggaugucaaaaaugca

SEQ ID NO: 3537 - RNA, 25 nt, Artificial Sequence
  Synthetic Oligonucleotide
uauugaggaugucaaaaaugcaauu

SEQ ID NO: 3538 - RNA, 25 nt, Artificial Sequence
  Synthetic Oligonucleotide
cuauugaggaugucaaaaaugcaau

SEQ ID NO: 3539 - RNA, 25 nt, Artificial Sequence
  Synthetic Oligonucleotide
auugaggaugucaaaaaugcaauug

SEQ ID NO: 3540 - RNA, 25 nt, Artificial Sequence
  Synthetic Oligonucleotide
acuauugaggaugucaaaaaugcaa

SEQ ID NO: 3541 - RNA, 25 nt, Artificial Sequence
  Synthetic Oligonucleotide
ggacuugaauggaaugauaacacag

SEQ ID NO: 3542 - RNA, 25 nt, Artificial Sequence
  Synthetic Oligonucleotide
acuugaauggaaugauaacacaguu

SEQ ID NO: 3543 - RNA, 25 nt, Artificial Sequence
  Synthetic Oligonucleotide
gacuugaauggaaugauaacacagu

SEQ ID NO: 3544 - RNA, 25 nt, Artificial Sequence
  Synthetic Oligonucleotide
gaugccccauuccuugaucggcuuc

SEQ ID NO: 3545 - RNA, 25 nt, Artificial Sequence
  Synthetic Oligonucleotide
uuggagaagcaguaaugagaauggg

SEQ ID NO: 3546 - RNA, 25 nt, Artificial Sequence
  Synthetic Oligonucleotide
cuuggagaagcaguaaugagaaugg

SEQ ID NO: 3547 - RNA, 25 nt, Artificial Sequence
  Synthetic Oligonucleotide
augccccauuccuugaucggcuucg

SEQ ID NO: 3548 - RNA, 25 nt, Artificial Sequence
  Synthetic Oligonucleotide
ugccccauuccuugaucggcuucgc

SEQ ID NO: 3549 - RNA, 25 nt, Artificial Sequence
  Synthetic Oligonucleotide
ccccauuccuugaucggcuucgccg

SEQ ID NO: 3550 - RNA, 25 nt, Artificial Sequence
  Synthetic Oligonucleotide
gccccauuccuugaucggcuucgcc

SEQ ID NO: 3551 - RNA, 25 nt, Artificial Sequence
  Synthetic Oligonucleotide
ucgcuuggagaagcaguaaugagaa

SEQ ID NO: 3552 - RNA, 25 nt, Artificial Sequence
  Synthetic Oligonucleotide
gcuuggagaagcaguaaugagaaug

SEQ ID NO: 3553 - RNA, 25 nt, Artificial Sequence
  Synthetic Oligonucleotide
cgcuuggagaagcaguaaugagaau

SEQ ID NO: 3554 - RNA, 25 nt, Artificial Sequence
  Synthetic Oligonucleotide
agauggcugauugaagaagugagac

SEQ ID NO: 3555 - RNA, 25 nt, Artificial Sequence
  Synthetic Oligonucleotide
aagauggcugauugaagaagugaga

SEQ ID NO: 3556 - RNA, 25 nt, Artificial Sequence
  Synthetic Oligonucleotide
gauggcugauugaagaagugagaca

SEQ ID NO: 3557 - RNA, 25 nt, Artificial Sequence
  Synthetic Oligonucleotide
gugaugccccauuccuugaucggcu

SEQ ID NO: 3558 - RNA, 25 nt, Artificial Sequence
  Synthetic Oligonucleotide
aagagauaagauggcugauugaaga

SEQ ID NO: 3559 - RNA, 25 nt, Artificial Sequence
  Synthetic Oligonucleotide
gaagagauaagauggcugauugaag

SEQ ID NO: 3560 - RNA, 25 nt, Artificial Sequence
  Synthetic Oligonucleotide
aauuguuggcgaaaucucaccauug

SEQ ID NO: 3561 - RNA, 25 nt, Artificial Sequence
  Synthetic Oligonucleotide
ugaugccccauuccuugaucggcuu

SEQ ID NO: 3562 - RNA, 25 nt, Artificial Sequence
  Synthetic Oligonucleotide
auuguuggcgaaaucucaccauugc

SEQ ID NO: 3563 - RNA, 25 nt, Artificial Sequence
  Synthetic Oligonucleotide
agagauaagauggcugauugaagaa

SEQ ID NO: 3564 - RNA, 25 nt, Artificial Sequence
  Synthetic Oligonucleotide
agauaagauggcugauugaagaagu

SEQ ID NO: 3565 - RNA, 25 nt, Artificial Sequence
  Synthetic Oligonucleotide
gagauaagauggcugauugaagaag

SEQ ID NO: 3566 - RNA, 25 nt, Artificial Sequence
  Synthetic Oligonucleotide
cccauuccuugaucggcuucgccga

SEQ ID NO: 3567 - RNA, 25 nt, Artificial Sequence
  Synthetic Oligonucleotide
caauuguuggcgaaaucucaccauu

SEQ ID NO: 3568 - RNA, 25 nt, Artificial Sequence
  Synthetic Oligonucleotide
gcaauuguuggcgaaaucucaccau

SEQ ID NO: 3569 - RNA, 25 nt, Artificial Sequence
  Synthetic Oligonucleotide
uuguuggcgaaaucucaccauugcc

SEQ ID NO: 3570 - RNA, 25 nt, Artificial Sequence
  Synthetic Oligonucleotide
uggcgaaaucucaccauugccuucu

SEQ ID NO: 3571 - RNA, 25 nt, Artificial Sequence
  Synthetic Oligonucleotide
uuggcgaaaucucaccauugccuuc

SEQ ID NO: 3572 - RNA, 25 nt, Artificial Sequence
  Synthetic Oligonucleotide
guuggcgaaaucucaccauugccuu

SEQ ID NO: 3573 - RNA, 25 nt, Artificial Sequence
  Synthetic Oligonucleotide
uccaaaacagaaacggaaaauggcg

SEQ ID NO: 3574 - RNA, 25 nt, Artificial Sequence
  Synthetic Oligonucleotide
uguuggcgaaaucucaccauugccu

SEQ ID NO: 3575 - RNA, 25 nt, Artificial Sequence
  Synthetic Oligonucleotide
cuccaaaacagaaacggaaaauggc

SEQ ID NO: 3576 - RNA, 25 nt, Artificial Sequence
  Synthetic Oligonucleotide
accauugccuucuuuuccaggacau

SEQ ID NO: 3577 - RNA, 25 nt, Artificial Sequence
  Synthetic Oligonucleotide
acuccaaaacagaaacggaaaaugg

SEQ ID NO: 3578 - RNA, 25 nt, Artificial Sequence
  Synthetic Oligonucleotide
ccauugccuucuuuuccaggacaua

SEQ ID NO: 3579 - RNA, 25 nt, Artificial Sequence
  Synthetic Oligonucleotide
auugccuucuuuuccaggacauacu

SEQ ID NO: 3580 - RNA, 25 nt, Artificial Sequence
  Synthetic Oligonucleotide
ucaccauugccuucuuuuccaggac

SEQ ID NO: 3581 - RNA, 25 nt, Artificial Sequence
  Synthetic Oligonucleotide
caaaacagaaacggaaaauggcgag

SEQ ID NO: 3582 - RNA, 25 nt, Artificial Sequence
  Synthetic Oligonucleotide
cauugccuucuuuuccaggacauac

SEQ ID NO: 3583 - RNA, 25 nt, Artificial Sequence
  Synthetic Oligonucleotide
caccauugccuucuuuuccaggaca

SEQ ID NO: 3584 - RNA, 25 nt, Artificial Sequence
  Synthetic Oligonucleotide
uugccuucuuuuccaggacauacua

SEQ ID NO: 3585 - RNA, 19 nt, Artificial Sequence
  Synthetic Oligonucleotide
agccagacagcgaccaaag

SEQ ID NO: 3586 - RNA, 19 nt, Artificial Sequence
  Synthetic Oligonucleotide
agucagacagcgaccaaaa

SEQ ID NO: 3587 - RNA, 19 nt, Artificial Sequence
  Synthetic Oligonucleotide
agccagacgacgaucaaaa

SEQ ID NO: 3588 - RNA, 19 nt, Artificial Sequence
  Synthetic Oligonucleotide
gccagacagcgaccaaagg

SEQ ID NO: 3589 - RNA, 19 nt, Artificial Sequence
  Synthetic Oligonucleotide
gucagacagcgaccaaaag

SEQ ID NO: 3590 - RNA, 19 nt, Artificial Sequence
  Synthetic Oligonucleotide
gccagacgacgaucaaaag

SEQ ID NO: 3591 - RNA, 19 nt, Artificial Sequence
  Synthetic Oligonucleotide
gacagucagacagcgacca

SEQ ID NO: 3592 - RNA, 19 nt, Artificial Sequence
  Synthetic Oligonucleotide
gauagccagacagcgacca

SEQ ID NO: 3593 - RNA, 19 nt, Artificial Sequence
  Synthetic Oligonucleotide
gacagccagacgacgauca

SEQ ID NO: 3594 - RNA, 19 nt, Artificial Sequence
  Synthetic Oligonucleotide
gacagccagacagcgccaa

SEQ ID NO: 3595 - RNA, 19 nt, Artificial Sequence
  Synthetic Oligonucleotide
cagucagacagcgaccaaa

SEQ ID NO: 3596 - RNA, 19 nt, Artificial Sequence
  Synthetic Oligonucleotide
uagccagacagcgaccaaa

SEQ ID NO: 3597 - RNA, 19 nt, Artificial Sequence
  Synthetic Oligonucleotide
cagccagacgacgaucaaa

SEQ ID NO: 3598 - RNA, 19 nt, Artificial Sequence
  Synthetic Oligonucleotide
acagucagacagcgaccaa

SEQ ID NO: 3599 - RNA, 19 nt, Artificial Sequence
  Synthetic Oligonucleotide
auagccagacagcgaccaa

SEQ ID NO: 3600 - RNA, 19 nt, Artificial Sequence
  Synthetic Oligonucleotide
acagccagacgacgaucaa

SEQ ID NO: 3601 - RNA, 19 nt, Artificial Sequence
  Synthetic Oligonucleotide
acagccagacagcgccaaa

SEQ ID NO: 3602 - RNA, 19 nt, Artificial Sequence
  Synthetic Oligonucleotide
agcauacuuacugacaguc

SEQ ID NO: 3603 - RNA, 19 nt, Artificial Sequence
  Synthetic Oligonucleotide
agcauacuuacugauagcc

SEQ ID NO: 3604 - RNA, 19 nt, Artificial Sequence
  Synthetic Oligonucleotide
agcaugcuuacugacagcc

SEQ ID NO: 3605 - RNA, 19 nt, Artificial Sequence
  Synthetic Oligonucleotide
agcauacuuaccgacagcc

SEQ ID NO: 3606 - RNA, 19 nt, Artificial Sequence
  Synthetic Oligonucleotide
agcagacuuacugacagcc

SEQ ID NO: 3607 - RNA, 19 nt, Artificial Sequence
  Synthetic Oligonucleotide
aacauacuuacugacagcc

SEQ ID NO: 3608 - RNA, 19 nt, Artificial Sequence
  Synthetic Oligonucleotide
auacuuacugacagucaga

SEQ ID NO: 3609 - RNA, 19 nt, Artificial Sequence
  Synthetic Oligonucleotide
auacuuacugauagccaga

SEQ ID NO: 3610 - RNA, 19 nt, Artificial Sequence
  Synthetic Oligonucleotide
augcuuacugacagccaga

SEQ ID NO: 3611 - RNA, 19 nt, Artificial Sequence
  Synthetic Oligonucleotide
auacuuaccgacagccaga

SEQ ID NO: 3612 - RNA, 19 nt, Artificial Sequence
  Synthetic Oligonucleotide
agacuuacugacagccaga

SEQ ID NO: 3613 - RNA, 19 nt, Artificial Sequence
  Synthetic Oligonucleotide
cauacuuacugacagucag

SEQ ID NO: 3614 - RNA, 19 nt, Artificial Sequence
  Synthetic Oligonucleotide
cauacuuacugauagccag

SEQ ID NO: 3615 - RNA, 19 nt, Artificial Sequence
  Synthetic Oligonucleotide
caugcuuacugacagccag

SEQ ID NO: 3616 - RNA, 19 nt, Artificial Sequence
  Synthetic Oligonucleotide
cauacuuaccgacagccag

SEQ ID NO: 3617 - RNA, 19 nt, Artificial Sequence
  Synthetic Oligonucleotide
cagacuuacugacagccag

SEQ ID NO: 3618 - RNA, 19 nt, Artificial Sequence
  Synthetic Oligonucleotide
gcauacuuacugacaguca

SEQ ID NO: 3619 - RNA, 19 nt, Artificial Sequence
  Synthetic Oligonucleotide
gcauacuuacugauagcca

SEQ ID NO: 3620 - RNA, 19 nt, Artificial Sequence
  Synthetic Oligonucleotide
gcaugcuuacugacagcca

SEQ ID NO: 3621 - RNA, 19 nt, Artificial Sequence
  Synthetic Oligonucleotide
gcauacuuaccgacagcca

SEQ ID NO: 3622 - RNA, 19 nt, Artificial Sequence
  Synthetic Oligonucleotide
gcagacuuacugacagcca

SEQ ID NO: 3623 - RNA, 19 nt, Artificial Sequence
  Synthetic Oligonucleotide
acauacuuacugacagcca

SEQ ID NO: 3624 - RNA, 19 nt, Artificial Sequence
  Synthetic Oligonucleotide
acuuacugacagucagaca

SEQ ID NO: 3625 - RNA, 19 nt, Artificial Sequence
  Synthetic Oligonucleotide
acuuacugauagccagaca

SEQ ID NO: 3626 - RNA, 19 nt, Artificial Sequence
  Synthetic Oligonucleotide
gcuuacugacagccagacg

SEQ ID NO: 3627 - RNA, 19 nt, Artificial Sequence
  Synthetic Oligonucleotide
acuuaccgacagccagaca

SEQ ID NO: 3628 - RNA, 19 nt, Artificial Sequence
  Synthetic Oligonucleotide
cuuacugacagucagacag

SEQ ID NO: 3629 - RNA, 19 nt, Artificial Sequence
  Synthetic Oligonucleotide
cuuacugauagccagacag

SEQ ID NO: 3630 - RNA, 19 nt, Artificial Sequence
  Synthetic Oligonucleotide
cuuaccgacagccagacag

SEQ ID NO: 3631 - RNA, 19 nt, Artificial Sequence
  Synthetic Oligonucleotide
cuuacugacagccagacga

SEQ ID NO: 3632 - RNA, 19 nt, Artificial Sequence
  Synthetic Oligonucleotide
uacuuacugacagucagac

SEQ ID NO: 3633 - RNA, 19 nt, Artificial Sequence
  Synthetic Oligonucleotide
uacuuacugauagccagac

SEQ ID NO: 3634 - RNA, 19 nt, Artificial Sequence
  Synthetic Oligonucleotide
ugcuuacugacagccagac

SEQ ID NO: 3635 - RNA, 19 nt, Artificial Sequence
  Synthetic Oligonucleotide
uacuuaccgacagccagac

SEQ ID NO: 3636 - RNA, 19 nt, Artificial Sequence
  Synthetic Oligonucleotide
gacuuacugacagccagac

SEQ ID NO: 3637 - RNA, 19 nt, Artificial Sequence
  Synthetic Oligonucleotide
cagacagcgaccaaaagag

SEQ ID NO: 3638 - RNA, 19 nt, Artificial Sequence
  Synthetic Oligonucleotide
cagacagcgaccaaaagga

SEQ ID NO: 3639 - RNA, 19 nt, Artificial Sequence
  Synthetic Oligonucleotide
cagacagcgaccaaaggaa

SEQ ID NO: 3640 - RNA, 19 nt, Artificial Sequence
  Synthetic Oligonucleotide
cagacagcgaccaaaagau

SEQ ID NO: 3641 - RNA, 19 nt, Artificial Sequence
  Synthetic Oligonucleotide
cagacgacgaucaaaagaa

SEQ ID NO: 3642 - RNA, 19 nt, Artificial Sequence
  Synthetic Oligonucleotide
uacugacagucagacagcg

SEQ ID NO: 3643 - RNA, 19 nt, Artificial Sequence
  Synthetic Oligonucleotide
uacugauagccagacagcg

SEQ ID NO: 3644 - RNA, 19 nt, Artificial Sequence
  Synthetic Oligonucleotide
uaccgacagccagacagcg

SEQ ID NO: 3645 - RNA, 19 nt, Artificial Sequence
  Synthetic Oligonucleotide
uacugacagccagacgacg

SEQ ID NO: 3646 - RNA, 19 nt, Artificial Sequence
  Synthetic Oligonucleotide
uuacugacagucagacagc

SEQ ID NO: 3647 - RNA, 19 nt, Artificial Sequence
  Synthetic Oligonucleotide
uuacugauagccagacagc

SEQ ID NO: 3648 - RNA, 19 nt, Artificial Sequence
  Synthetic Oligonucleotide
uuaccgacagccagacagc

SEQ ID NO: 3649 - RNA, 19 nt, Artificial Sequence
  Synthetic Oligonucleotide
uuacugacagccagacgac

SEQ ID NO: 3650 - RNA, 19 nt, Artificial Sequence
  Synthetic Oligonucleotide
acugacagucagacagcga

SEQ ID NO: 3651 - RNA, 19 nt, Artificial Sequence
  Synthetic Oligonucleotide
acugauagccagacagcga

SEQ ID NO: 3652 - RNA, 19 nt, Artificial Sequence
  Synthetic Oligonucleotide
acugacagccagacagcgc

SEQ ID NO: 3653 - RNA, 19 nt, Artificial Sequence
  Synthetic Oligonucleotide
accgacagccagacagcga

SEQ ID NO: 3654 - RNA, 19 nt, Artificial Sequence
  Synthetic Oligonucleotide
acugacagccagacgacga

SEQ ID NO: 3655 - RNA, 19 nt, Artificial Sequence
  Synthetic Oligonucleotide
ugacagucagacagcgacc

SEQ ID NO: 3656 - RNA, 19 nt, Artificial Sequence
  Synthetic Oligonucleotide
ugauagccagacagcgacc

SEQ ID NO: 3657 - RNA, 19 nt, Artificial Sequence
  Synthetic Oligonucleotide
cgacagccagacagcgacc

SEQ ID NO: 3658 - RNA, 19 nt, Artificial Sequence
  Synthetic Oligonucleotide
ugacagccagacgacgauc

SEQ ID NO: 3659 - RNA, 19 nt, Artificial Sequence
  Synthetic Oligonucleotide
ugacagccagacagcgcca

SEQ ID NO: 3660 - RNA, 19 nt, Artificial Sequence
  Synthetic Oligonucleotide
cugacagucagacagcgac

SEQ ID NO: 3661 - RNA, 19 nt, Artificial Sequence
  Synthetic Oligonucleotide
cugauagccagacagcgac

SEQ ID NO: 3662 - RNA, 19 nt, Artificial Sequence
  Synthetic Oligonucleotide
cugacagccagacagcgcc

SEQ ID NO: 3663 - RNA, 19 nt, Artificial Sequence
  Synthetic Oligonucleotide
ccgacagccagacagcgac

SEQ ID NO: 3664 - RNA, 19 nt, Artificial Sequence
  Synthetic Oligonucleotide
cugacagccagacgacgau

SEQ ID NO: 3665 - RNA, 19 nt, Artificial Sequence
  Synthetic Oligonucleotide
agacagcgaccaaaagagu

SEQ ID NO: 3666 - RNA, 19 nt, Artificial Sequence
  Synthetic Oligonucleotide
agacagcgaccaaaaggau

SEQ ID NO: 3667 - RNA, 19 nt, Artificial Sequence
  Synthetic Oligonucleotide
agacagcgaccaaaggaau

SEQ ID NO: 3668 - RNA, 19 nt, Artificial Sequence
  Synthetic Oligonucleotide
agacagcgaccaaaagaag

SEQ ID NO: 3669 - RNA, 19 nt, Artificial Sequence
  Synthetic Oligonucleotide
agacagcgaccaaaagauu

SEQ ID NO: 3670 - RNA, 19 nt, Artificial Sequence
  Synthetic Oligonucleotide
agacgacgaucaaaagaau

SEQ ID NO: 3671 - RNA, 19 nt, Artificial Sequence
  Synthetic Oligonucleotide
ccagacagcgaccaaaagg

SEQ ID NO: 3672 - RNA, 19 nt, Artificial Sequence
  Synthetic Oligonucleotide
ccagacagcgaccaaagga

SEQ ID NO: 3673 - RNA, 19 nt, Artificial Sequence
  Synthetic Oligonucleotide
ucagacagcgaccaaaaga

SEQ ID NO: 3674 - RNA, 19 nt, Artificial Sequence
  Synthetic Oligonucleotide
ccagacgacgaucaaaaga

SEQ ID NO: 3675 - RNA, 19 nt, Artificial Sequence
  Synthetic Oligonucleotide
acagcgaccaaaagaguuc

SEQ ID NO: 3676 - RNA, 19 nt, Artificial Sequence
  Synthetic Oligonucleotide
acagcgaccaaaaggauuc

SEQ ID NO: 3677 - RNA, 19 nt, Artificial Sequence
  Synthetic Oligonucleotide
acagcgaccaaaggaauuc

SEQ ID NO: 3678 - RNA, 19 nt, Artificial Sequence
  Synthetic Oligonucleotide
acagcgaccaaaagaaguc

SEQ ID NO: 3679 - RNA, 19 nt, Artificial Sequence
  Synthetic Oligonucleotide
acagcgaccaaaagauuuc

SEQ ID NO: 3680 - RNA, 19 nt, Artificial Sequence
  Synthetic Oligonucleotide
acgacgaucaaaagaauuc

SEQ ID NO: 3681 - RNA, 19 nt, Artificial Sequence
  Synthetic Oligonucleotide
gacagcgaccaaaagaguu

SEQ ID NO: 3682 - RNA, 19 nt, Artificial Sequence
  Synthetic Oligonucleotide
gacagcgaccaaaaggauu

SEQ ID NO: 3683 - RNA, 19 nt, Artificial Sequence
  Synthetic Oligonucleotide
gacagcgaccaaaggaauu

SEQ ID NO: 3684 - RNA, 19 nt, Artificial Sequence
  Synthetic Oligonucleotide
gacagcgaccaaaagaagu

SEQ ID NO: 3685 - RNA, 19 nt, Artificial Sequence
  Synthetic Oligonucleotide
gacagcgaccaaaagauuu

SEQ ID NO: 3686 - RNA, 19 nt, Artificial Sequence
  Synthetic Oligonucleotide
gacgacgaucaaaagaauu

SEQ ID NO: 3687 - RNA, 19 nt, Artificial Sequence
  Synthetic Oligonucleotide
cagcgaccaaaagaguucg

SEQ ID NO: 3688 - RNA, 19 nt, Artificial Sequence
  Synthetic Oligonucleotide
cagcgaccaaaaggauucg

SEQ ID NO: 3689 - RNA, 19 nt, Artificial Sequence
  Synthetic Oligonucleotide
cagcgaccaaaggaauucg

SEQ ID NO: 3690 - RNA, 19 nt, Artificial Sequence
  Synthetic Oligonucleotide
cagcgaccaaaagaauucc

SEQ ID NO: 3691 - RNA, 19 nt, Artificial Sequence
  Synthetic Oligonucleotide
cagcgaccaaaagaagucg

SEQ ID NO: 3692 - RNA, 19 nt, Artificial Sequence
  Synthetic Oligonucleotide
cagcgaccaaaagauuucg

SEQ ID NO: 3693 - RNA, 19 nt, Artificial Sequence
  Synthetic Oligonucleotide
cgacgaucaaaagaauucg

SEQ ID NO: 3694 - RNA, 19 nt, Artificial Sequence
  Synthetic Oligonucleotide
acucuagcaugcuuacuga

SEQ ID NO: 3695 - RNA, 19 nt, Artificial Sequence
  Synthetic Oligonucleotide
acuuuagcauacuuacuga

SEQ ID NO: 3696 - RNA, 19 nt, Artificial Sequence
  Synthetic Oligonucleotide
acucuagcauacuuaccga

SEQ ID NO: 3697 - RNA, 19 nt, Artificial Sequence
  Synthetic Oligonucleotide
acucuagcagacuuacuga

SEQ ID NO: 3698 - RNA, 19 nt, Artificial Sequence
  Synthetic Oligonucleotide
acucuaacauacuuacuga

SEQ ID NO: 3699 - RNA, 19 nt, Artificial Sequence
  Synthetic Oligonucleotide
acuccagcauacuuacuga

SEQ ID NO: 3700 - RNA, 19 nt, Artificial Sequence
  Synthetic Oligonucleotide
acuauagcauacuuacuga

SEQ ID NO: 3701 - RNA, 19 nt, Artificial Sequence
  Synthetic Oligonucleotide
cucuagcauacuuacugau

SEQ ID NO: 3702 - RNA, 19 nt, Artificial Sequence
  Synthetic Oligonucleotide
cucuagcaugcuuacugac

SEQ ID NO: 3703 - RNA, 19 nt, Artificial Sequence
  Synthetic Oligonucleotide
cuuuagcauacuuacugac

SEQ ID NO: 3704 - RNA, 19 nt, Artificial Sequence
  Synthetic Oligonucleotide
cucuagcauacuuaccgac

SEQ ID NO: 3705 - RNA, 19 nt, Artificial Sequence
  Synthetic Oligonucleotide
cucuagcagacuuacugac

SEQ ID NO: 3706 - RNA, 19 nt, Artificial Sequence
  Synthetic Oligonucleotide
cucuaacauacuuacugac

SEQ ID NO: 3707 - RNA, 19 nt, Artificial Sequence
  Synthetic Oligonucleotide
cuccagcauacuuacugac

SEQ ID NO: 3708 - RNA, 19 nt, Artificial Sequence
  Synthetic Oligonucleotide
cuauagcauacuuacugac

SEQ ID NO: 3709 - RNA, 19 nt, Artificial Sequence
  Synthetic Oligonucleotide
cuagcauacuuacugauag

SEQ ID NO: 3710 - RNA, 19 nt, Artificial Sequence
  Synthetic Oligonucleotide
cuagcaugcuuacugacag

SEQ ID NO: 3711 - RNA, 19 nt, Artificial Sequence
  Synthetic Oligonucleotide
uuagcauacuuacugacag

SEQ ID NO: 3712 - RNA, 19 nt, Artificial Sequence
  Synthetic Oligonucleotide
cuagcauacuuaccgacag

SEQ ID NO: 3713 - RNA, 19 nt, Artificial Sequence
  Synthetic Oligonucleotide
cuagcagacuuacugacag

SEQ ID NO: 3714 - RNA, 19 nt, Artificial Sequence
  Synthetic Oligonucleotide
cuaacauacuuacugacag

SEQ ID NO: 3715 - RNA, 19 nt, Artificial Sequence
  Synthetic Oligonucleotide
ccagcauacuuacugacag

SEQ ID NO: 3716 - RNA, 19 nt, Artificial Sequence
  Synthetic Oligonucleotide
auagcauacuuacugacag

SEQ ID NO: 3717 - RNA, 19 nt, Artificial Sequence
  Synthetic Oligonucleotide
ucuagcauacuuacugaua

SEQ ID NO: 3718 - RNA, 19 nt, Artificial Sequence
  Synthetic Oligonucleotide
ucuagcaugcuuacugaca

SEQ ID NO: 3719 - RNA, 19 nt, Artificial Sequence
  Synthetic Oligonucleotide
uuuagcauacuuacugaca

SEQ ID NO: 3720 - RNA, 19 nt, Artificial Sequence
  Synthetic Oligonucleotide
ucuagcauacuuaccgaca

SEQ ID NO: 3721 - RNA, 19 nt, Artificial Sequence
  Synthetic Oligonucleotide
ucuagcagacuuacugaca

SEQ ID NO: 3722 - RNA, 19 nt, Artificial Sequence
  Synthetic Oligonucleotide
ucuaacauacuuacugaca

SEQ ID NO: 3723 - RNA, 19 nt, Artificial Sequence
  Synthetic Oligonucleotide
uccagcauacuuacugaca

SEQ ID NO: 3724 - RNA, 19 nt, Artificial Sequence
  Synthetic Oligonucleotide
uauagcauacuuacugaca

SEQ ID NO: 3725 - RNA, 19 nt, Artificial Sequence
  Synthetic Oligonucleotide
uagcauacuuacugacagu

SEQ ID NO: 3726 - RNA, 19 nt, Artificial Sequence
  Synthetic Oligonucleotide
uagcauacuuacugauagc

SEQ ID NO: 3727 - RNA, 19 nt, Artificial Sequence
  Synthetic Oligonucleotide
uagcaugcuuacugacagc

SEQ ID NO: 3728 - RNA, 19 nt, Artificial Sequence
  Synthetic Oligonucleotide
uagcauacuuaccgacagc

SEQ ID NO: 3729 - RNA, 19 nt, Artificial Sequence
  Synthetic Oligonucleotide
uagcagacuuacugacagc

SEQ ID NO: 3730 - RNA, 19 nt, Artificial Sequence
  Synthetic Oligonucleotide
uaacauacuuacugacagc

SEQ ID NO: 3731 - RNA, 19 nt, Artificial Sequence
  Synthetic Oligonucleotide
cagcauacuuacugacagc

SEQ ID NO: 3732 - RNA, 19 nt, Artificial Sequence
  Synthetic Oligonucleotide
gacucuagcaugcuuacug

SEQ ID NO: 3733 - RNA, 19 nt, Artificial Sequence
  Synthetic Oligonucleotide
gacuuuagcauacuuacug

SEQ ID NO: 3734 - RNA, 19 nt, Artificial Sequence
  Synthetic Oligonucleotide
gacucuagcauacuuaccg

SEQ ID NO: 3735 - RNA, 19 nt, Artificial Sequence
  Synthetic Oligonucleotide
gacucuagcagacuuacug

SEQ ID NO: 3736 - RNA, 19 nt, Artificial Sequence
  Synthetic Oligonucleotide
gacucuaacauacuuacug

SEQ ID NO: 3737 - RNA, 19 nt, Artificial Sequence
  Synthetic Oligonucleotide
gacuccagcauacuuacug

SEQ ID NO: 3738 - RNA, 19 nt, Artificial Sequence
  Synthetic Oligonucleotide
gacuauagcauacuuacug

SEQ ID NO: 3739 - RNA, 19 nt, Artificial Sequence
  Synthetic Oligonucleotide
aacucuagcauacuuacug

SEQ ID NO: 3740 - RNA, 19 nt, Artificial Sequence
  Synthetic Oligonucleotide
gcgaccaaaagaguucgga

SEQ ID NO: 3741 - RNA, 19 nt, Artificial Sequence
  Synthetic Oligonucleotide
gcgaccaaaaggauucgga

SEQ ID NO: 3742 - RNA, 19 nt, Artificial Sequence
  Synthetic Oligonucleotide
gcgaccaaaggaauucgga

SEQ ID NO: 3743 - RNA, 19 nt, Artificial Sequence
  Synthetic Oligonucleotide
gcgaccaaaagaauucgaa

SEQ ID NO: 3744 - RNA, 19 nt, Artificial Sequence
  Synthetic Oligonucleotide
gcgaccaaaagaauuccga

SEQ ID NO: 3745 - RNA, 19 nt, Artificial Sequence
  Synthetic Oligonucleotide
gcgaccaaaagaagucgga

SEQ ID NO: 3746 - RNA, 19 nt, Artificial Sequence
  Synthetic Oligonucleotide
gcgaccaaaagauuucgga

SEQ ID NO: 3747 - RNA, 19 nt, Artificial Sequence
  Synthetic Oligonucleotide
gcgaccaaaaggauucgaa

SEQ ID NO: 3748 - RNA, 19 nt, Artificial Sequence
  Synthetic Oligonucleotide
acgaucaaaagaauucgga

SEQ ID NO: 3749 - RNA, 19 nt, Artificial Sequence
  Synthetic Oligonucleotide
caaaagaguucggauggcc

SEQ ID NO: 3750 - RNA, 19 nt, Artificial Sequence
  Synthetic Oligonucleotide
caaaaggauucggauggcc

SEQ ID NO: 3751 - RNA, 19 nt, Artificial Sequence
  Synthetic Oligonucleotide
caaaggaauucggauggcc

SEQ ID NO: 3752 - RNA, 19 nt, Artificial Sequence
  Synthetic Oligonucleotide
caaaagaauucgaauggcc

SEQ ID NO: 3753 - RNA, 19 nt, Artificial Sequence
  Synthetic Oligonucleotide
caaaagaauuccgauggcc

SEQ ID NO: 3754 - RNA, 19 nt, Artificial Sequence
  Synthetic Oligonucleotide
caaaagauuucggauggcc

SEQ ID NO: 3755 - RNA, 19 nt, Artificial Sequence
  Synthetic Oligonucleotide
caaaaggauucgaauggcc

SEQ ID NO: 3756 - RNA, 19 nt, Artificial Sequence
  Synthetic Oligonucleotide
caaaagaagucggacugcc

SEQ ID NO: 3757 - RNA, 19 nt, Artificial Sequence
  Synthetic Oligonucleotide
gaccaaaagaguucggaug

SEQ ID NO: 3758 - RNA, 19 nt, Artificial Sequence
  Synthetic Oligonucleotide
gaccaaaaggauucggaug

SEQ ID NO: 3759 - RNA, 19 nt, Artificial Sequence
  Synthetic Oligonucleotide
gaccaaaggaauucggaug

SEQ ID NO: 3760 - RNA, 19 nt, Artificial Sequence
  Synthetic Oligonucleotide
gaucaaaagaauucggaug

SEQ ID NO: 3761 - RNA, 19 nt, Artificial Sequence
  Synthetic Oligonucleotide
gaccaaaagaauucgaaug

SEQ ID NO: 3762 - RNA, 19 nt, Artificial Sequence
  Synthetic Oligonucleotide
gaccaaaagaauuccgaug

SEQ ID NO: 3763 - RNA, 19 nt, Artificial Sequence
  Synthetic Oligonucleotide
gaccaaaagauuucggaug

SEQ ID NO: 3764 - RNA, 19 nt, Artificial Sequence
  Synthetic Oligonucleotide
gaccaaaaggauucgaaug

SEQ ID NO: 3765 - RNA, 19 nt, Artificial Sequence
  Synthetic Oligonucleotide
gaccaaaagaagucggacu

SEQ ID NO: 3766 - RNA, 19 nt, Artificial Sequence
  Synthetic Oligonucleotide
cgaccaaaagaguucggau

SEQ ID NO: 3767 - RNA, 19 nt, Artificial Sequence
  Synthetic Oligonucleotide
cgaccaaaaggauucggau

SEQ ID NO: 3768 - RNA, 19 nt, Artificial Sequence
  Synthetic Oligonucleotide
cgaccaaaggaauucggau

SEQ ID NO: 3769 - RNA, 19 nt, Artificial Sequence
  Synthetic Oligonucleotide
cgaucaaaagaauucggau

SEQ ID NO: 3770 - RNA, 19 nt, Artificial Sequence
  Synthetic Oligonucleotide
cgaccaaaagaauucgaau

SEQ ID NO: 3771 - RNA, 19 nt, Artificial Sequence
  Synthetic Oligonucleotide
cgaccaaaagaauuccgau

SEQ ID NO: 3772 - RNA, 19 nt, Artificial Sequence
  Synthetic Oligonucleotide
cgaccaaaagauuucggau

SEQ ID NO: 3773 - RNA, 19 nt, Artificial Sequence
  Synthetic Oligonucleotide
cgaccaaaaggauucgaau

SEQ ID NO: 3774 - RNA, 19 nt, Artificial Sequence
  Synthetic Oligonucleotide
cgaccaaaagaagucggac

SEQ ID NO: 3775 - RNA, 19 nt, Artificial Sequence
  Synthetic Oligonucleotide
agcgaccaaaagaguucgg

SEQ ID NO: 3776 - RNA, 19 nt, Artificial Sequence
  Synthetic Oligonucleotide
agcgaccaaaaggauucgg

SEQ ID NO: 3777 - RNA, 19 nt, Artificial Sequence
  Synthetic Oligonucleotide
agcgaccaaaggaauucgg

SEQ ID NO: 3778 - RNA, 19 nt, Artificial Sequence
  Synthetic Oligonucleotide
agcgaccaaaagaauucga

SEQ ID NO: 3779 - RNA, 19 nt, Artificial Sequence
  Synthetic Oligonucleotide
agcgaccaaaagaauuccg

SEQ ID NO: 3780 - RNA, 19 nt, Artificial Sequence
  Synthetic Oligonucleotide
agcgaccaaaagaagucgg

SEQ ID NO: 3781 - RNA, 19 nt, Artificial Sequence
  Synthetic Oligonucleotide
agcgaccaaaagauuucgg

SEQ ID NO: 3782 - RNA, 19 nt, Artificial Sequence
  Synthetic Oligonucleotide
agcgaccaaaaggauucga

SEQ ID NO: 3783 - RNA, 19 nt, Artificial Sequence
  Synthetic Oligonucleotide
gacgaucaaaagaauucgg

SEQ ID NO: 3784 - RNA, 19 nt, Artificial Sequence
  Synthetic Oligonucleotide
aaaagaguucggauggcca

SEQ ID NO: 3785 - RNA, 19 nt, Artificial Sequence
  Synthetic Oligonucleotide
aaaaggauucggauggcca

SEQ ID NO: 3786 - RNA, 19 nt, Artificial Sequence
  Synthetic Oligonucleotide
aaaggaauucggauggcca

SEQ ID NO: 3787 - RNA, 19 nt, Artificial Sequence
  Synthetic Oligonucleotide
aaaagaauucgaauggcca

SEQ ID NO: 3788 - RNA, 19 nt, Artificial Sequence
  Synthetic Oligonucleotide
aaaagaauuccgauggcca

SEQ ID NO: 3789 - RNA, 19 nt, Artificial Sequence
  Synthetic Oligonucleotide
aaaagauuucggauggcca

SEQ ID NO: 3790 - RNA, 19 nt, Artificial Sequence
  Synthetic Oligonucleotide
aaaaggauucgaauggcca

SEQ ID NO: 3791 - RNA, 19 nt, Artificial Sequence
  Synthetic Oligonucleotide
aaaagaauucgaauggccu

SEQ ID NO: 3792 - RNA, 19 nt, Artificial Sequence
  Synthetic Oligonucleotide
aaaagaagucggacugcca

SEQ ID NO: 3793 - RNA, 19 nt, Artificial Sequence
  Synthetic Oligonucleotide
aaagaguucggauggccau

SEQ ID NO: 3794 - RNA, 19 nt, Artificial Sequence
  Synthetic Oligonucleotide
aaaggauucggauggccau

SEQ ID NO: 3795 - RNA, 19 nt, Artificial Sequence
  Synthetic Oligonucleotide
aaggaauucggauggccau

SEQ ID NO: 3796 - RNA, 19 nt, Artificial Sequence
  Synthetic Oligonucleotide
aaagaauucggauggccac

SEQ ID NO: 3797 - RNA, 19 nt, Artificial Sequence
  Synthetic Oligonucleotide
aaagaauucgaauggccau

SEQ ID NO: 3798 - RNA, 19 nt, Artificial Sequence
  Synthetic Oligonucleotide
aaagaauuccgauggccau

SEQ ID NO: 3799 - RNA, 19 nt, Artificial Sequence
  Synthetic Oligonucleotide
aaagauuucggauggccau

SEQ ID NO: 3800 - RNA, 19 nt, Artificial Sequence
  Synthetic Oligonucleotide
aaaggauucgaauggccau

SEQ ID NO: 3801 - RNA, 19 nt, Artificial Sequence
  Synthetic Oligonucleotide
aaagaauucgaauggccuu

SEQ ID NO: 3802 - RNA, 19 nt, Artificial Sequence
  Synthetic Oligonucleotide
aaagaagucggacugccau

SEQ ID NO: 3803 - RNA, 19 nt, Artificial Sequence
  Synthetic Oligonucleotide
ccaaaagaguucggauggc

SEQ ID NO: 3804 - RNA, 19 nt, Artificial Sequence
  Synthetic Oligonucleotide
ccaaaaggauucggauggc

SEQ ID NO: 3805 - RNA, 19 nt, Artificial Sequence
  Synthetic Oligonucleotide
ccaaaggaauucggauggc

SEQ ID NO: 3806 - RNA, 19 nt, Artificial Sequence
  Synthetic Oligonucleotide
ucaaaagaauucggauggc

SEQ ID NO: 3807 - RNA, 19 nt, Artificial Sequence
  Synthetic Oligonucleotide
ccaaaagaauucgaauggc

SEQ ID NO: 3808 - RNA, 19 nt, Artificial Sequence
  Synthetic Oligonucleotide
ccaaaagaauuccgauggc

SEQ ID NO: 3809 - RNA, 19 nt, Artificial Sequence
  Synthetic Oligonucleotide
ccaaaagauuucggauggc

SEQ ID NO: 3810 - RNA, 19 nt, Artificial Sequence
  Synthetic Oligonucleotide
ccaaaaggauucgaauggc

SEQ ID NO: 3811 - RNA, 19 nt, Artificial Sequence
  Synthetic Oligonucleotide
ccaaaagaagucggacugc

SEQ ID NO: 3812 - RNA, 19 nt, Artificial Sequence
  Synthetic Oligonucleotide
accaaaagaguucggaugg

SEQ ID NO: 3813 - RNA, 19 nt, Artificial Sequence
  Synthetic Oligonucleotide
accaaaaggauucggaugg

SEQ ID NO: 3814 - RNA, 19 nt, Artificial Sequence
  Synthetic Oligonucleotide
accaaaggaauucggaugg

SEQ ID NO: 3815 - RNA, 19 nt, Artificial Sequence
  Synthetic Oligonucleotide
aucaaaagaauucggaugg

SEQ ID NO: 3816 - RNA, 19 nt, Artificial Sequence
  Synthetic Oligonucleotide
accaaaagaauucgaaugg

SEQ ID NO: 3817 - RNA, 19 nt, Artificial Sequence
  Synthetic Oligonucleotide
accaaaagaauuccgaugg

SEQ ID NO: 3818 - RNA, 19 nt, Artificial Sequence
  Synthetic Oligonucleotide
accaaaagauuucggaugg

SEQ ID NO: 3819 - RNA, 19 nt, Artificial Sequence
  Synthetic Oligonucleotide
accaaaaggauucgaaugg

SEQ ID NO: 3820 - RNA, 19 nt, Artificial Sequence
  Synthetic Oligonucleotide
accaaaagaagucggacug

SEQ ID NO: 3821 - RNA, 19 nt, Artificial Sequence
  Synthetic Oligonucleotide
aaagguuaaaacaugggac

SEQ ID NO: 3822 - RNA, 19 nt, Artificial Sequence
  Synthetic Oligonucleotide
aaagguuaaagcauggaac

SEQ ID NO: 3823 - RNA, 19 nt, Artificial Sequence
  Synthetic Oligonucleotide
aaagguuaagacauggaac

SEQ ID NO: 3824 - RNA, 19 nt, Artificial Sequence
  Synthetic Oligonucleotide
aaagguugaaacauggaac

SEQ ID NO: 3825 - RNA, 19 nt, Artificial Sequence
  Synthetic Oligonucleotide
aaagguuaaagcaugggac

SEQ ID NO: 3826 - RNA, 19 nt, Artificial Sequence
  Synthetic Oligonucleotide
aaagguuaaggcaugggac

SEQ ID NO: 3827 - RNA, 19 nt, Artificial Sequence
  Synthetic Oligonucleotide
aaagguuaaaacaugguac

SEQ ID NO: 3828 - RNA, 19 nt, Artificial Sequence
  Synthetic Oligonucleotide
aaagguuaaaacacggaac

SEQ ID NO: 3829 - RNA, 19 nt, Artificial Sequence
  Synthetic Oligonucleotide
aaagguuaaaaaauggaac

SEQ ID NO: 3830 - RNA, 19 nt, Artificial Sequence
  Synthetic Oligonucleotide
aaaggcuaaaacauggaac

SEQ ID NO: 3831 - RNA, 19 nt, Artificial Sequence
  Synthetic Oligonucleotide
aaagauuaaaacauggaac

SEQ ID NO: 3832 - RNA, 19 nt, Artificial Sequence
  Synthetic Oligonucleotide
aaagguuaaagcacggaac

SEQ ID NO: 3833 - RNA, 19 nt, Artificial Sequence
  Synthetic Oligonucleotide
aaaggcuaaagcauggaac

SEQ ID NO: 3834 - RNA, 19 nt, Artificial Sequence
  Synthetic Oligonucleotide
aaagauuaaaacacggaac

SEQ ID NO: 3835 - RNA, 19 nt, Artificial Sequence
  Synthetic Oligonucleotide
aaagauuaaaacacgggac

SEQ ID NO: 3836 - RNA, 19 nt, Artificial Sequence
  Synthetic Oligonucleotide
gaaagguuaaaacauggga

SEQ ID NO: 3837 - RNA, 19 nt, Artificial Sequence
  Synthetic Oligonucleotide
gaaagguuaaagcauggaa

SEQ ID NO: 3838 - RNA, 19 nt, Artificial Sequence
  Synthetic Oligonucleotide
gaaagguuaagacauggaa

SEQ ID NO: 3839 - RNA, 19 nt, Artificial Sequence
  Synthetic Oligonucleotide
gaaagguugaaacauggaa

SEQ ID NO: 3840 - RNA, 19 nt, Artificial Sequence
  Synthetic Oligonucleotide
gaaagguuaaagcauggga

SEQ ID NO: 3841 - RNA, 19 nt, Artificial Sequence
  Synthetic Oligonucleotide
gaaagguuaaggcauggga

SEQ ID NO: 3842 - RNA, 19 nt, Artificial Sequence
  Synthetic Oligonucleotide
gaaagguuaaaacauggua

SEQ ID NO: 3843 - RNA, 19 nt, Artificial Sequence
  Synthetic Oligonucleotide
gaaagguuaaaacacggaa

SEQ ID NO: 3844 - RNA, 19 nt, Artificial Sequence
  Synthetic Oligonucleotide
gaaagguuaaaaaauggaa

SEQ ID NO: 3845 - RNA, 19 nt, Artificial Sequence
  Synthetic Oligonucleotide
gaaaggcuaaaacauggaa

SEQ ID NO: 3846 - RNA, 19 nt, Artificial Sequence
  Synthetic Oligonucleotide
gaaagauuaaaacauggaa

SEQ ID NO: 3847 - RNA, 19 nt, Artificial Sequence
  Synthetic Oligonucleotide
aaaagguuaaaacauggaa

SEQ ID NO: 3848 - RNA, 19 nt, Artificial Sequence
  Synthetic Oligonucleotide
gaaagguuaaagcacggaa

SEQ ID NO: 3849 - RNA, 19 nt, Artificial Sequence
  Synthetic Oligonucleotide
gaaaggcuaaagcauggaa

SEQ ID NO: 3850 - RNA, 19 nt, Artificial Sequence
  Synthetic Oligonucleotide
gaaagauuaaaacacggaa

SEQ ID NO: 3851 - RNA, 19 nt, Artificial Sequence
  Synthetic Oligonucleotide
gaaagauuaaaacacggga

SEQ ID NO: 3852 - RNA, 19 nt, Artificial Sequence
  Synthetic Oligonucleotide
uggaugauggcaaugagau

SEQ ID NO: 3853 - RNA, 19 nt, Artificial Sequence
  Synthetic Oligonucleotide
uggaugauggcgaugaaau

SEQ ID NO: 3854 - RNA, 19 nt, Artificial Sequence
  Synthetic Oligonucleotide
uggaugauggccaugaaau

SEQ ID NO: 3855 - RNA, 19 nt, Artificial Sequence
  Synthetic Oligonucleotide
uggaugauggcuaugaaau

SEQ ID NO: 3856 - RNA, 19 nt, Artificial Sequence
  Synthetic Oligonucleotide
ggaugauggcaaugagaua

SEQ ID NO: 3857 - RNA, 19 nt, Artificial Sequence
  Synthetic Oligonucleotide
ggaugauggcgaugaaaua

SEQ ID NO: 3858 - RNA, 19 nt, Artificial Sequence
  Synthetic Oligonucleotide
ggaugauggccaugaaaua

SEQ ID NO: 3859 - RNA, 19 nt, Artificial Sequence
  Synthetic Oligonucleotide
ggaugauggcuaugaaaua

SEQ ID NO: 3860 - RNA, 19 nt, Artificial Sequence
  Synthetic Oligonucleotide
aaauggaugauggcgauga

SEQ ID NO: 3861 - RNA, 19 nt, Artificial Sequence
  Synthetic Oligonucleotide
aaguggaugauggcaauga

SEQ ID NO: 3862 - RNA, 19 nt, Artificial Sequence
  Synthetic Oligonucleotide
aaauggaugauggccauga

SEQ ID NO: 3863 - RNA, 19 nt, Artificial Sequence
  Synthetic Oligonucleotide
aaauggaugauggcuauga

SEQ ID NO: 3864 - RNA, 19 nt, Artificial Sequence
  Synthetic Oligonucleotide
gaaauggaugauggcgaug

SEQ ID NO: 3865 - RNA, 19 nt, Artificial Sequence
  Synthetic Oligonucleotide
gaaguggaugauggcaaug

SEQ ID NO: 3866 - RNA, 19 nt, Artificial Sequence
  Synthetic Oligonucleotide
gaaauggaugauggccaug

SEQ ID NO: 3867 - RNA, 19 nt, Artificial Sequence
  Synthetic Oligonucleotide
gaaauggaugauggcuaug

SEQ ID NO: 3868 - RNA, 19 nt, Artificial Sequence
  Synthetic Oligonucleotide
ugaaauggaugauggcgau

SEQ ID NO: 3869 - RNA, 19 nt, Artificial Sequence
  Synthetic Oligonucleotide
ugaaguggaugauggcaau

SEQ ID NO: 3870 - RNA, 19 nt, Artificial Sequence
  Synthetic Oligonucleotide
ugaaauggaugauggccau

SEQ ID NO: 3871 - RNA, 19 nt, Artificial Sequence
  Synthetic Oligonucleotide
ugaaauggaugauggcuau

SEQ ID NO: 3872 - RNA, 19 nt, Artificial Sequence
  Synthetic Oligonucleotide
aagaauucggauggccauu

SEQ ID NO: 3873 - RNA, 19 nt, Artificial Sequence
  Synthetic Oligonucleotide
aagaguucggauggccauc

SEQ ID NO: 3874 - RNA, 19 nt, Artificial Sequence
  Synthetic Oligonucleotide
aaggauucggauggccauc

SEQ ID NO: 3875 - RNA, 19 nt, Artificial Sequence
  Synthetic Oligonucleotide
aggaauucggauggccauc

SEQ ID NO: 3876 - RNA, 19 nt, Artificial Sequence
  Synthetic Oligonucleotide
aagaauucggauggccacc

SEQ ID NO: 3877 - RNA, 19 nt, Artificial Sequence
  Synthetic Oligonucleotide
aagaauucgaauggccauc

SEQ ID NO: 3878 - RNA, 19 nt, Artificial Sequence
  Synthetic Oligonucleotide
aagaauuccgauggccauc

SEQ ID NO: 3879 - RNA, 19 nt, Artificial Sequence
  Synthetic Oligonucleotide
aagauuucggauggccauc

SEQ ID NO: 3880 - RNA, 19 nt, Artificial Sequence
  Synthetic Oligonucleotide
aaggauucgaauggccauc

SEQ ID NO: 3881 - RNA, 19 nt, Artificial Sequence
  Synthetic Oligonucleotide
aagaauucgaauggccuuc

SEQ ID NO: 3882 - RNA, 19 nt, Artificial Sequence
  Synthetic Oligonucleotide
aagaagucggacugccauc

SEQ ID NO: 3883 - RNA, 19 nt, Artificial Sequence
  Synthetic Oligonucleotide
augaaauggaugauggcga

SEQ ID NO: 3884 - RNA, 19 nt, Artificial Sequence
  Synthetic Oligonucleotide
augaaguggaugauggcaa

SEQ ID NO: 3885 - RNA, 19 nt, Artificial Sequence
  Synthetic Oligonucleotide
gugaaauggaugauggcaa

SEQ ID NO: 3886 - RNA, 19 nt, Artificial Sequence
  Synthetic Oligonucleotide
augaaauggaugauggcca

SEQ ID NO: 3887 - RNA, 19 nt, Artificial Sequence
  Synthetic Oligonucleotide
augaaauggaugauggcua

SEQ ID NO: 3888 - RNA, 19 nt, Artificial Sequence
  Synthetic Oligonucleotide
auggaugauggcaaugaga

SEQ ID NO: 3889 - RNA, 19 nt, Artificial Sequence
  Synthetic Oligonucleotide
auggaugauggcgaugaaa

SEQ ID NO: 3890 - RNA, 19 nt, Artificial Sequence
  Synthetic Oligonucleotide
guggaugauggcaaugaaa

SEQ ID NO: 3891 - RNA, 19 nt, Artificial Sequence
  Synthetic Oligonucleotide
auggaugauggccaugaaa

SEQ ID NO: 3892 - RNA, 19 nt, Artificial Sequence
  Synthetic Oligonucleotide
auggaugauggcuaugaaa

SEQ ID NO: 3893 - RNA, 19 nt, Artificial Sequence
  Synthetic Oligonucleotide
aauggaugauggcaaugag

SEQ ID NO: 3894 - RNA, 19 nt, Artificial Sequence
  Synthetic Oligonucleotide
aauggaugauggcgaugaa

SEQ ID NO: 3895 - RNA, 19 nt, Artificial Sequence
  Synthetic Oligonucleotide
aguggaugauggcaaugaa

SEQ ID NO: 3896 - RNA, 19 nt, Artificial Sequence
  Synthetic Oligonucleotide
aauggaugauggccaugaa

SEQ ID NO: 3897 - RNA, 19 nt, Artificial Sequence
  Synthetic Oligonucleotide
aauggaugauggcuaugaa

SEQ ID NO: 3898 - RNA, 19 nt, Artificial Sequence
  Synthetic Oligonucleotide
agaauucggauggccauua

SEQ ID NO: 3899 - RNA, 19 nt, Artificial Sequence
  Synthetic Oligonucleotide
agaguucggauggccauca

SEQ ID NO: 3900 - RNA, 19 nt, Artificial Sequence
  Synthetic Oligonucleotide
aggauucggauggccauca

SEQ ID NO: 3901 - RNA, 19 nt, Artificial Sequence
  Synthetic Oligonucleotide
ggaauucggauggccauca

SEQ ID NO: 3902 - RNA, 19 nt, Artificial Sequence
  Synthetic Oligonucleotide
agaauucggauggccacca

SEQ ID NO: 3903 - RNA, 19 nt, Artificial Sequence
  Synthetic Oligonucleotide
agaauucgaauggccauca

SEQ ID NO: 3904 - RNA, 19 nt, Artificial Sequence
  Synthetic Oligonucleotide
agaauuccgauggccauca

SEQ ID NO: 3905 - RNA, 19 nt, Artificial Sequence
  Synthetic Oligonucleotide
agauuucggauggccauca

SEQ ID NO: 3906 - RNA, 19 nt, Artificial Sequence
  Synthetic Oligonucleotide
aggauucgaauggccauca

SEQ ID NO: 3907 - RNA, 19 nt, Artificial Sequence
  Synthetic Oligonucleotide
agaauucgaauggccuuca

SEQ ID NO: 3908 - RNA, 19 nt, Artificial Sequence
  Synthetic Oligonucleotide
agaagucggacugccauca

SEQ ID NO: 3909 - RNA, 19 nt, Artificial Sequence
  Synthetic Oligonucleotide
gaauucggauggccauuaa

SEQ ID NO: 3910 - RNA, 19 nt, Artificial Sequence
  Synthetic Oligonucleotide
gaguucggauggccaucaa

SEQ ID NO: 3911 - RNA, 19 nt, Artificial Sequence
  Synthetic Oligonucleotide
ggauucggauggccaucaa

SEQ ID NO: 3912 - RNA, 19 nt, Artificial Sequence
  Synthetic Oligonucleotide
gaauucggauggccaucau

SEQ ID NO: 3913 - RNA, 19 nt, Artificial Sequence
  Synthetic Oligonucleotide
gaauucggauggccaccaa

SEQ ID NO: 3914 - RNA, 19 nt, Artificial Sequence
  Synthetic Oligonucleotide
gaauucgaauggccaucaa

SEQ ID NO: 3915 - RNA, 19 nt, Artificial Sequence
  Synthetic Oligonucleotide
gaauuccgauggccaucaa

SEQ ID NO: 3916 - RNA, 19 nt, Artificial Sequence
  Synthetic Oligonucleotide
gauuucggauggccaucaa

SEQ ID NO: 3917 - RNA, 19 nt, Artificial Sequence
  Synthetic Oligonucleotide
ggauucgaauggccaucaa

SEQ ID NO: 3918 - RNA, 19 nt, Artificial Sequence
  Synthetic Oligonucleotide
gaauucgaauggccuucaa

SEQ ID NO: 3919 - RNA, 19 nt, Artificial Sequence
  Synthetic Oligonucleotide
gaagucggacugccaucaa

SEQ ID NO: 3920 - RNA, 19 nt, Artificial Sequence
  Synthetic Oligonucleotide
aauucggauggccauuaau

SEQ ID NO: 3921 - RNA, 19 nt, Artificial Sequence
  Synthetic Oligonucleotide
aguucggauggccaucaau

SEQ ID NO: 3922 - RNA, 19 nt, Artificial Sequence
  Synthetic Oligonucleotide
gauucggauggccaucaau

SEQ ID NO: 3923 - RNA, 19 nt, Artificial Sequence
  Synthetic Oligonucleotide
aauucggauggccaucaac

SEQ ID NO: 3924 - RNA, 19 nt, Artificial Sequence
  Synthetic Oligonucleotide
aauucggauggccaucaag

SEQ ID NO: 3925 - RNA, 19 nt, Artificial Sequence
  Synthetic Oligonucleotide
aauucggauggccaucauu

SEQ ID NO: 3926 - RNA, 19 nt, Artificial Sequence
  Synthetic Oligonucleotide
aauucggauggccaccaau

SEQ ID NO: 3927 - RNA, 19 nt, Artificial Sequence
  Synthetic Oligonucleotide
aauucgaauggccaucaau

SEQ ID NO: 3928 - RNA, 19 nt, Artificial Sequence
  Synthetic Oligonucleotide
aauuccgauggccaucaau

SEQ ID NO: 3929 - RNA, 19 nt, Artificial Sequence
  Synthetic Oligonucleotide
auuucggauggccaucaau

SEQ ID NO: 3930 - RNA, 19 nt, Artificial Sequence
  Synthetic Oligonucleotide
gauucgaauggccaucaau

SEQ ID NO: 3931 - RNA, 19 nt, Artificial Sequence
  Synthetic Oligonucleotide
aauucgaauggccuucaau

SEQ ID NO: 3932 - RNA, 19 nt, Artificial Sequence
  Synthetic Oligonucleotide
aagucggacugccaucaau

SEQ ID NO: 3933 - RNA, 19 nt, Artificial Sequence
  Synthetic Oligonucleotide
auucggauggccauuaauu

SEQ ID NO: 3934 - RNA, 19 nt, Artificial Sequence
  Synthetic Oligonucleotide
guucggauggccaucaauu

SEQ ID NO: 3935 - RNA, 19 nt, Artificial Sequence
  Synthetic Oligonucleotide
auucggauggccaucaaua

SEQ ID NO: 3936 - RNA, 19 nt, Artificial Sequence
  Synthetic Oligonucleotide
auucggauggccaucaauc

SEQ ID NO: 3937 - RNA, 19 nt, Artificial Sequence
  Synthetic Oligonucleotide
auucggauggccaucaacu

SEQ ID NO: 3938 - RNA, 19 nt, Artificial Sequence
  Synthetic Oligonucleotide
auucggauggccaucaagu

SEQ ID NO: 3939 - RNA, 19 nt, Artificial Sequence
  Synthetic Oligonucleotide
auucggauggccaucauuu

SEQ ID NO: 3940 - RNA, 19 nt, Artificial Sequence
  Synthetic Oligonucleotide
auucgaauggccaucaauu

SEQ ID NO: 3941 - RNA, 19 nt, Artificial Sequence
  Synthetic Oligonucleotide
auuccgauggccaucaauu

SEQ ID NO: 3942 - RNA, 19 nt, Artificial Sequence
  Synthetic Oligonucleotide
uuucggauggccaucaauu

SEQ ID NO: 3943 - RNA, 19 nt, Artificial Sequence
  Synthetic Oligonucleotide
auucggauggccaccaaug

SEQ ID NO: 3944 - RNA, 19 nt, Artificial Sequence
  Synthetic Oligonucleotide
auucgaauggccuucaauu

SEQ ID NO: 3945 - RNA, 19 nt, Artificial Sequence
  Synthetic Oligonucleotide
agucggacugccaucaauu

SEQ ID NO: 3946 - RNA, 19 nt, Artificial Sequence
  Synthetic Oligonucleotide
uucggauggccauuaauua

SEQ ID NO: 3947 - RNA, 19 nt, Artificial Sequence
  Synthetic Oligonucleotide
uucggauggccaucaauuu

SEQ ID NO: 3948 - RNA, 19 nt, Artificial Sequence
  Synthetic Oligonucleotide
uucggauggccaucaauca

SEQ ID NO: 3949 - RNA, 19 nt, Artificial Sequence
  Synthetic Oligonucleotide
uucggauggccaucaacua

SEQ ID NO: 3950 - RNA, 19 nt, Artificial Sequence
  Synthetic Oligonucleotide
uucggauggccaucaagua

SEQ ID NO: 3951 - RNA, 19 nt, Artificial Sequence
  Synthetic Oligonucleotide
uucggauggccaucauuua

SEQ ID NO: 3952 - RNA, 19 nt, Artificial Sequence
  Synthetic Oligonucleotide
uucgaauggccaucaauua

SEQ ID NO: 3953 - RNA, 19 nt, Artificial Sequence
  Synthetic Oligonucleotide
uuccgauggccaucaauua

SEQ ID NO: 3954 - RNA, 19 nt, Artificial Sequence
  Synthetic Oligonucleotide
uucggauggccaucaauag

SEQ ID NO: 3955 - RNA, 19 nt, Artificial Sequence
  Synthetic Oligonucleotide
uucggauggccaccaauga

SEQ ID NO: 3956 - RNA, 19 nt, Artificial Sequence
  Synthetic Oligonucleotide
uucgaauggccuucaauua

SEQ ID NO: 3957 - RNA, 19 nt, Artificial Sequence
  Synthetic Oligonucleotide
gucggacugccaucaauua

SEQ ID NO: 3958 - RNA, 19 nt, Artificial Sequence
  Synthetic Oligonucleotide
gggacucuagcaugcuuac

SEQ ID NO: 3959 - RNA, 19 nt, Artificial Sequence
  Synthetic Oligonucleotide
gggacuuuagcauacuuac

SEQ ID NO: 3960 - RNA, 19 nt, Artificial Sequence
  Synthetic Oligonucleotide
gggacucuagcagacuuac

SEQ ID NO: 3961 - RNA, 19 nt, Artificial Sequence
  Synthetic Oligonucleotide
gggacucuaacauacuuac

SEQ ID NO: 3962 - RNA, 19 nt, Artificial Sequence
  Synthetic Oligonucleotide
gggacuccagcauacuuac

SEQ ID NO: 3963 - RNA, 19 nt, Artificial Sequence
  Synthetic Oligonucleotide
gggacuauagcauacuuac

SEQ ID NO: 3964 - RNA, 19 nt, Artificial Sequence
  Synthetic Oligonucleotide
ggaacucuagcauacuuac

SEQ ID NO: 3965 - RNA, 19 nt, Artificial Sequence
  Synthetic Oligonucleotide
gagacucuagcauacuuac

SEQ ID NO: 3966 - RNA, 19 nt, Artificial Sequence
  Synthetic Oligonucleotide
gaaacucuagcauacuuac

SEQ ID NO: 3967 - RNA, 19 nt, Artificial Sequence
  Synthetic Oligonucleotide
aacgggacucuagcaugcu

SEQ ID NO: 3968 - RNA, 19 nt, Artificial Sequence
  Synthetic Oligonucleotide
aacgggacuuuagcauacu

SEQ ID NO: 3969 - RNA, 19 nt, Artificial Sequence
  Synthetic Oligonucleotide
aaugggacucuagcauacu

SEQ ID NO: 3970 - RNA, 19 nt, Artificial Sequence
  Synthetic Oligonucleotide
aacgggacucuagcagacu

SEQ ID NO: 3971 - RNA, 19 nt, Artificial Sequence
  Synthetic Oligonucleotide
aacgggacucuaacauacu

SEQ ID NO: 3972 - RNA, 19 nt, Artificial Sequence
  Synthetic Oligonucleotide
aacgggacuccagcauacu

SEQ ID NO: 3973 - RNA, 19 nt, Artificial Sequence
  Synthetic Oligonucleotide
aacgggacuauagcauacu

SEQ ID NO: 3974 - RNA, 19 nt, Artificial Sequence
  Synthetic Oligonucleotide
aacggaacucuagcauacu

SEQ ID NO: 3975 - RNA, 19 nt, Artificial Sequence
  Synthetic Oligonucleotide
aacgagacucuagcauacu

SEQ ID NO: 3976 - RNA, 19 nt, Artificial Sequence
  Synthetic Oligonucleotide
aaagggacucuagcauacu

SEQ ID NO: 3977 - RNA, 19 nt, Artificial Sequence
  Synthetic Oligonucleotide
aacgaaacucuagcauacu

SEQ ID NO: 3978 - RNA, 19 nt, Artificial Sequence
  Synthetic Oligonucleotide
aaagagacucuagcauacu

SEQ ID NO: 3979 - RNA, 19 nt, Artificial Sequence
  Synthetic Oligonucleotide
acgggacucuagcaugcuu

SEQ ID NO: 3980 - RNA, 19 nt, Artificial Sequence
  Synthetic Oligonucleotide
acgggacuuuagcauacuu

SEQ ID NO: 3981 - RNA, 19 nt, Artificial Sequence
  Synthetic Oligonucleotide
augggacucuagcauacuu

SEQ ID NO: 3982 - RNA, 19 nt, Artificial Sequence
  Synthetic Oligonucleotide
acgggacucuagcagacuu

SEQ ID NO: 3983 - RNA, 19 nt, Artificial Sequence
  Synthetic Oligonucleotide
acgggacucuaacauacuu

SEQ ID NO: 3984 - RNA, 19 nt, Artificial Sequence
  Synthetic Oligonucleotide
acgggacuccagcauacuu

SEQ ID NO: 3985 - RNA, 19 nt, Artificial Sequence
  Synthetic Oligonucleotide
acgggacuauagcauacuu

SEQ ID NO: 3986 - RNA, 19 nt, Artificial Sequence
  Synthetic Oligonucleotide
acggaacucuagcauacuu

SEQ ID NO: 3987 - RNA, 19 nt, Artificial Sequence
  Synthetic Oligonucleotide
acgagacucuagcauacuu

SEQ ID NO: 3988 - RNA, 19 nt, Artificial Sequence
  Synthetic Oligonucleotide
aagggacucuagcauacuu

SEQ ID NO: 3989 - RNA, 19 nt, Artificial Sequence
  Synthetic Oligonucleotide
acgaaacucuagcauacuu

SEQ ID NO: 3990 - RNA, 19 nt, Artificial Sequence
  Synthetic Oligonucleotide
aagagacucuagcauacuu

SEQ ID NO: 3991 - RNA, 19 nt, Artificial Sequence
  Synthetic Oligonucleotide
aaacgggacucuagcaugc

SEQ ID NO: 3992 - RNA, 19 nt, Artificial Sequence
  Synthetic Oligonucleotide
aaacgggacuuuagcauac

SEQ ID NO: 3993 - RNA, 19 nt, Artificial Sequence
  Synthetic Oligonucleotide
aaaugggacucuagcauac

SEQ ID NO: 3994 - RNA, 19 nt, Artificial Sequence
  Synthetic Oligonucleotide
aaacgggacucuagcagac

SEQ ID NO: 3995 - RNA, 19 nt, Artificial Sequence
  Synthetic Oligonucleotide
aaacgggacucuaacauac

SEQ ID NO: 3996 - RNA, 19 nt, Artificial Sequence
  Synthetic Oligonucleotide
aaacgggacuccagcauac

SEQ ID NO: 3997 - RNA, 19 nt, Artificial Sequence
  Synthetic Oligonucleotide
aaacgggacuauagcauac

SEQ ID NO: 3998 - RNA, 19 nt, Artificial Sequence
  Synthetic Oligonucleotide
aaacggaacucuagcauac

SEQ ID NO: 3999 - RNA, 19 nt, Artificial Sequence
  Synthetic Oligonucleotide
aaacgagacucuagcauac

SEQ ID NO: 4000 - RNA, 19 nt, Artificial Sequence
  Synthetic Oligonucleotide
aaaagggacucuagcauac

SEQ ID NO: 4001 - RNA, 19 nt, Artificial Sequence
  Synthetic Oligonucleotide
aaacgaaacucuagcauac

SEQ ID NO: 4002 - RNA, 19 nt, Artificial Sequence
  Synthetic Oligonucleotide
aaaagagacucuagcauac

SEQ ID NO: 4003 - RNA, 19 nt, Artificial Sequence
  Synthetic Oligonucleotide
cgggacucuagcaugcuua

SEQ ID NO: 4004 - RNA, 19 nt, Artificial Sequence
  Synthetic Oligonucleotide
cgggacuuuagcauacuua

SEQ ID NO: 4005 - RNA, 19 nt, Artificial Sequence
  Synthetic Oligonucleotide
ugggacucuagcauacuua

SEQ ID NO: 4006 - RNA, 19 nt, Artificial Sequence
  Synthetic Oligonucleotide
cgggacucuagcagacuua

SEQ ID NO: 4007 - RNA, 19 nt, Artificial Sequence
  Synthetic Oligonucleotide
cgggacucuaacauacuua

SEQ ID NO: 4008 - RNA, 19 nt, Artificial Sequence
  Synthetic Oligonucleotide
cgggacuccagcauacuua

SEQ ID NO: 4009 - RNA, 19 nt, Artificial Sequence
  Synthetic Oligonucleotide
cgggacuauagcauacuua

SEQ ID NO: 4010 - RNA, 19 nt, Artificial Sequence
  Synthetic Oligonucleotide
cggaacucuagcauacuua

SEQ ID NO: 4011 - RNA, 19 nt, Artificial Sequence
  Synthetic Oligonucleotide
cgagacucuagcauacuua

SEQ ID NO: 4012 - RNA, 19 nt, Artificial Sequence
  Synthetic Oligonucleotide
agggacucuagcauacuua

SEQ ID NO: 4013 - RNA, 19 nt, Artificial Sequence
  Synthetic Oligonucleotide
cgaaacucuagcauacuua

SEQ ID NO: 4014 - RNA, 19 nt, Artificial Sequence
  Synthetic Oligonucleotide
agagacucuagcauacuua

SEQ ID NO: 4015 - RNA, 19 nt, Artificial Sequence
  Synthetic Oligonucleotide
ggacucuagcaugcuuacu

SEQ ID NO: 4016 - RNA, 19 nt, Artificial Sequence
  Synthetic Oligonucleotide
ggacuuuagcauacuuacu

SEQ ID NO: 4017 - RNA, 19 nt, Artificial Sequence
  Synthetic Oligonucleotide
ggacucuagcauacuuacc

SEQ ID NO: 4018 - RNA, 19 nt, Artificial Sequence
  Synthetic Oligonucleotide
ggacucuagcagacuuacu

SEQ ID NO: 4019 - RNA, 19 nt, Artificial Sequence
  Synthetic Oligonucleotide
ggacucuaacauacuuacu

SEQ ID NO: 4020 - RNA, 19 nt, Artificial Sequence
  Synthetic Oligonucleotide
ggacuccagcauacuuacu

SEQ ID NO: 4021 - RNA, 19 nt, Artificial Sequence
  Synthetic Oligonucleotide
ggacuauagcauacuuacu

SEQ ID NO: 4022 - RNA, 19 nt, Artificial Sequence
  Synthetic Oligonucleotide
gaacucuagcauacuuacu

SEQ ID NO: 4023 - RNA, 19 nt, Artificial Sequence
  Synthetic Oligonucleotide
agacucuagcauacuuacu

SEQ ID NO: 4024 - RNA, 19 nt, Artificial Sequence
  Synthetic Oligonucleotide
aaacucuagcauacuuacu

SEQ ID NO: 4025 - RNA, 19 nt, Artificial Sequence
  Synthetic Oligonucleotide
caagcuguggauauaugua

SEQ ID NO: 4026 - RNA, 19 nt, Artificial Sequence
  Synthetic Oligonucleotide
caagcuguggguauaugca

SEQ ID NO: 4027 - RNA, 19 nt, Artificial Sequence
  Synthetic Oligonucleotide
caggcuguggauauaugca

SEQ ID NO: 4028 - RNA, 19 nt, Artificial Sequence
  Synthetic Oligonucleotide
caagcuguggauauuugca

SEQ ID NO: 4029 - RNA, 19 nt, Artificial Sequence
  Synthetic Oligonucleotide
caagcuguggaaauaugca

SEQ ID NO: 4030 - RNA, 19 nt, Artificial Sequence
  Synthetic Oligonucleotide
caagcuguggacauaugca

SEQ ID NO: 4031 - RNA, 19 nt, Artificial Sequence
  Synthetic Oligonucleotide
caagcugugaauauaugca

SEQ ID NO: 4032 - RNA, 19 nt, Artificial Sequence
  Synthetic Oligonucleotide
caagcuguagauauaugca

SEQ ID NO: 4033 - RNA, 19 nt, Artificial Sequence
  Synthetic Oligonucleotide
caagcuguugauauaugca

SEQ ID NO: 4034 - RNA, 19 nt, Artificial Sequence
  Synthetic Oligonucleotide
caagcaguggauauaugca

SEQ ID NO: 4035 - RNA, 19 nt, Artificial Sequence
  Synthetic Oligonucleotide
caagccguggauauaugca

SEQ ID NO: 4036 - RNA, 19 nt, Artificial Sequence
  Synthetic Oligonucleotide
caagcugugggcauaugca

SEQ ID NO: 4037 - RNA, 19 nt, Artificial Sequence
  Synthetic Oligonucleotide
caagccguggauauaugua

SEQ ID NO: 4038 - RNA, 19 nt, Artificial Sequence
  Synthetic Oligonucleotide
caagccguggguauaugca

SEQ ID NO: 4039 - RNA, 19 nt, Artificial Sequence
  Synthetic Oligonucleotide
caagcuguugacauaugca

SEQ ID NO: 4040 - RNA, 19 nt, Artificial Sequence
  Synthetic Oligonucleotide
caagcaguagauauaugca

SEQ ID NO: 4041 - RNA, 19 nt, Artificial Sequence
  Synthetic Oligonucleotide
caagccguggauauuugca

SEQ ID NO: 4042 - RNA, 19 nt, Artificial Sequence
  Synthetic Oligonucleotide
caagccguugauauaugca

SEQ ID NO: 4043 - RNA, 19 nt, Artificial Sequence
  Synthetic Oligonucleotide
caagccguagacauaugca

SEQ ID NO: 4044 - RNA, 19 nt, Artificial Sequence
  Synthetic Oligonucleotide
aagcuguggauauauguaa

SEQ ID NO: 4045 - RNA, 19 nt, Artificial Sequence
  Synthetic Oligonucleotide
aagcuguggguauaugcaa

SEQ ID NO: 4046 - RNA, 19 nt, Artificial Sequence
  Synthetic Oligonucleotide
aggcuguggauauaugcaa

SEQ ID NO: 4047 - RNA, 19 nt, Artificial Sequence
  Synthetic Oligonucleotide
aagcuguggauauuugcaa

SEQ ID NO: 4048 - RNA, 19 nt, Artificial Sequence
  Synthetic Oligonucleotide
aagcuguggaaauaugcaa

SEQ ID NO: 4049 - RNA, 19 nt, Artificial Sequence
  Synthetic Oligonucleotide
aagcuguggacauaugcaa

SEQ ID NO: 4050 - RNA, 19 nt, Artificial Sequence
  Synthetic Oligonucleotide
aagcugugaauauaugcaa

SEQ ID NO: 4051 - RNA, 19 nt, Artificial Sequence
  Synthetic Oligonucleotide
aagcuguagauauaugcaa

SEQ ID NO: 4052 - RNA, 19 nt, Artificial Sequence
  Synthetic Oligonucleotide
aagcuguugauauaugcaa

SEQ ID NO: 4053 - RNA, 19 nt, Artificial Sequence
  Synthetic Oligonucleotide
aagcaguggauauaugcaa

SEQ ID NO: 4054 - RNA, 19 nt, Artificial Sequence
  Synthetic Oligonucleotide
aagccguggauauaugcaa

SEQ ID NO: 4055 - RNA, 19 nt, Artificial Sequence
  Synthetic Oligonucleotide
aagcugugggcauaugcaa

SEQ ID NO: 4056 - RNA, 19 nt, Artificial Sequence
  Synthetic Oligonucleotide
aagccguggauauauguaa

SEQ ID NO: 4057 - RNA, 19 nt, Artificial Sequence
  Synthetic Oligonucleotide
aagccguggguauaugcaa

SEQ ID NO: 4058 - RNA, 19 nt, Artificial Sequence
  Synthetic Oligonucleotide
aagcuguugacauaugcaa

SEQ ID NO: 4059 - RNA, 19 nt, Artificial Sequence
  Synthetic Oligonucleotide
aagcaguagauauaugcaa

SEQ ID NO: 4060 - RNA, 19 nt, Artificial Sequence
  Synthetic Oligonucleotide
aagccguggauauuugcaa

SEQ ID NO: 4061 - RNA, 19 nt, Artificial Sequence
  Synthetic Oligonucleotide
aagccguugauauaugcaa

SEQ ID NO: 4062 - RNA, 19 nt, Artificial Sequence
  Synthetic Oligonucleotide
aagccguagacauaugcaa

SEQ ID NO: 4063 - RNA, 19 nt, Artificial Sequence
  Synthetic Oligonucleotide
augaaacgaaaaugggacu

SEQ ID NO: 4064 - RNA, 19 nt, Artificial Sequence
  Synthetic Oligonucleotide
augaaacggaaacgggacu

SEQ ID NO: 4065 - RNA, 19 nt, Artificial Sequence
  Synthetic Oligonucleotide
augaaacgaaaacggaacu

SEQ ID NO: 4066 - RNA, 19 nt, Artificial Sequence
  Synthetic Oligonucleotide
augaaacgaaaacgagacu

SEQ ID NO: 4067 - RNA, 19 nt, Artificial Sequence
  Synthetic Oligonucleotide
augaaacgaaaaagggacu

SEQ ID NO: 4068 - RNA, 19 nt, Artificial Sequence
  Synthetic Oligonucleotide
augaaacggaaacggaacu

SEQ ID NO: 4069 - RNA, 19 nt, Artificial Sequence
  Synthetic Oligonucleotide
augaaacggaaacgagacu

SEQ ID NO: 4070 - RNA, 19 nt, Artificial Sequence
  Synthetic Oligonucleotide
augaaacggaaacgaaacu

SEQ ID NO: 4071 - RNA, 19 nt, Artificial Sequence
  Synthetic Oligonucleotide
augaaacggaaaagagacu

SEQ ID NO: 4072 - RNA, 19 nt, Artificial Sequence
  Synthetic Oligonucleotide
agguuaaaacauggaacuu

SEQ ID NO: 4073 - RNA, 19 nt, Artificial Sequence
  Synthetic Oligonucleotide
agguuaaaacaugggaccu

SEQ ID NO: 4074 - RNA, 19 nt, Artificial Sequence
  Synthetic Oligonucleotide
agguuaaagcauggaaccu

SEQ ID NO: 4075 - RNA, 19 nt, Artificial Sequence
  Synthetic Oligonucleotide
agguuaagacauggaaccu

SEQ ID NO: 4076 - RNA, 19 nt, Artificial Sequence
  Synthetic Oligonucleotide
agguugaaacauggaaccu

SEQ ID NO: 4077 - RNA, 19 nt, Artificial Sequence
  Synthetic Oligonucleotide
agguuaaagcaugggacuu

SEQ ID NO: 4078 - RNA, 19 nt, Artificial Sequence
  Synthetic Oligonucleotide
agguuaaaacauggaacau

SEQ ID NO: 4079 - RNA, 19 nt, Artificial Sequence
  Synthetic Oligonucleotide
agguuaaaacaugguaccu

SEQ ID NO: 4080 - RNA, 19 nt, Artificial Sequence
  Synthetic Oligonucleotide
agguuaaaacacggaaccu

SEQ ID NO: 4081 - RNA, 19 nt, Artificial Sequence
  Synthetic Oligonucleotide
agguuaaaaaauggaaccu

SEQ ID NO: 4082 - RNA, 19 nt, Artificial Sequence
  Synthetic Oligonucleotide
aggcuaaaacauggaaccu

SEQ ID NO: 4083 - RNA, 19 nt, Artificial Sequence
  Synthetic Oligonucleotide
agauuaaaacauggaaccu

SEQ ID NO: 4084 - RNA, 19 nt, Artificial Sequence
  Synthetic Oligonucleotide
agguuaaagcacggaaccu

SEQ ID NO: 4085 - RNA, 19 nt, Artificial Sequence
  Synthetic Oligonucleotide
aggcuaaagcauggaaccu

SEQ ID NO: 4086 - RNA, 19 nt, Artificial Sequence
  Synthetic Oligonucleotide
agguuaaaacacggaacau

SEQ ID NO: 4087 - RNA, 19 nt, Artificial Sequence
  Synthetic Oligonucleotide
agauuaaaacacggaaccu

SEQ ID NO: 4088 - RNA, 19 nt, Artificial Sequence
  Synthetic Oligonucleotide
agauuaaaacacgggaccu

SEQ ID NO: 4089 - RNA, 19 nt, Artificial Sequence
  Synthetic Oligonucleotide
aagguuaaaacauggaacu

SEQ ID NO: 4090 - RNA, 19 nt, Artificial Sequence
  Synthetic Oligonucleotide
aagguuaaaacaugggacc

SEQ ID NO: 4091 - RNA, 19 nt, Artificial Sequence
  Synthetic Oligonucleotide
aagguuaaagcauggaacc

SEQ ID NO: 4092 - RNA, 19 nt, Artificial Sequence
  Synthetic Oligonucleotide
aagguuaagacauggaacc

SEQ ID NO: 4093 - RNA, 19 nt, Artificial Sequence
  Synthetic Oligonucleotide
aagguugaaacauggaacc

SEQ ID NO: 4094 - RNA, 19 nt, Artificial Sequence
  Synthetic Oligonucleotide
aagguuaaagcaugggacu

SEQ ID NO: 4095 - RNA, 19 nt, Artificial Sequence
  Synthetic Oligonucleotide
aagguuaaaacauggaaca

SEQ ID NO: 4096 - RNA, 19 nt, Artificial Sequence
  Synthetic Oligonucleotide
aagguuaaaacaugguacc

SEQ ID NO: 4097 - RNA, 19 nt, Artificial Sequence
  Synthetic Oligonucleotide
aagguuaaaacacggaacc

SEQ ID NO: 4098 - RNA, 19 nt, Artificial Sequence
  Synthetic Oligonucleotide
aagguuaaaaaauggaacc

SEQ ID NO: 4099 - RNA, 19 nt, Artificial Sequence
  Synthetic Oligonucleotide
aaggcuaaaacauggaacc

SEQ ID NO: 4100 - RNA, 19 nt, Artificial Sequence
  Synthetic Oligonucleotide
aagauuaaaacauggaacc

SEQ ID NO: 4101 - RNA, 19 nt, Artificial Sequence
  Synthetic Oligonucleotide
aagguuaaagcacggaacc

SEQ ID NO: 4102 - RNA, 19 nt, Artificial Sequence
  Synthetic Oligonucleotide
aaggcuaaagcauggaacc

SEQ ID NO: 4103 - RNA, 19 nt, Artificial Sequence
  Synthetic Oligonucleotide
aagguuaaaacacggaaca

SEQ ID NO: 4104 - RNA, 19 nt, Artificial Sequence
  Synthetic Oligonucleotide
aagauuaaaacacggaacc

SEQ ID NO: 4105 - RNA, 19 nt, Artificial Sequence
  Synthetic Oligonucleotide
aagauuaaaacacgggacc

SEQ ID NO: 4106 - RNA, 19 nt, Artificial Sequence
  Synthetic Oligonucleotide
gguuaaaacauggaacuuu

SEQ ID NO: 4107 - RNA, 19 nt, Artificial Sequence
  Synthetic Oligonucleotide
gguuaaaacaugggaccuu

SEQ ID NO: 4108 - RNA, 19 nt, Artificial Sequence
  Synthetic Oligonucleotide
gguuaaagcauggaaccuu

SEQ ID NO: 4109 - RNA, 19 nt, Artificial Sequence
  Synthetic Oligonucleotide
gguuaagacauggaaccuu

SEQ ID NO: 4110 - RNA, 19 nt, Artificial Sequence
  Synthetic Oligonucleotide
gguugaaacauggaaccuu

SEQ ID NO: 4111 - RNA, 19 nt, Artificial Sequence
  Synthetic Oligonucleotide
gguuaaagcaugggacuuu

SEQ ID NO: 4112 - RNA, 19 nt, Artificial Sequence
  Synthetic Oligonucleotide
gguuaaaacauggaacauu

SEQ ID NO: 4113 - RNA, 19 nt, Artificial Sequence
  Synthetic Oligonucleotide
gguuaaaacaugguaccuu

SEQ ID NO: 4114 - RNA, 19 nt, Artificial Sequence
  Synthetic Oligonucleotide
gguuaaaacacggaaccuu

SEQ ID NO: 4115 - RNA, 19 nt, Artificial Sequence
  Synthetic Oligonucleotide
gguuaaaaaauggaaccuu

SEQ ID NO: 4116 - RNA, 19 nt, Artificial Sequence
  Synthetic Oligonucleotide
ggcuaaaacauggaaccuu

SEQ ID NO: 4117 - RNA, 19 nt, Artificial Sequence
  Synthetic Oligonucleotide
gauuaaaacauggaaccuu

SEQ ID NO: 4118 - RNA, 19 nt, Artificial Sequence
  Synthetic Oligonucleotide
gguuaaagcacggaaccuu

SEQ ID NO: 4119 - RNA, 19 nt, Artificial Sequence
  Synthetic Oligonucleotide
ggcuaaagcauggaaccuu

SEQ ID NO: 4120 - RNA, 19 nt, Artificial Sequence
  Synthetic Oligonucleotide
gguuaaaacacggaacauu

SEQ ID NO: 4121 - RNA, 19 nt, Artificial Sequence
  Synthetic Oligonucleotide
gauuaaaacacggaaccuu

SEQ ID NO: 4122 - RNA, 19 nt, Artificial Sequence
  Synthetic Oligonucleotide
gauuaaaacacgggaccuu

SEQ ID NO: 4123 - RNA, 19 nt, Artificial Sequence
  Synthetic Oligonucleotide
ugaaacgaaaaugggacuc

SEQ ID NO: 4124 - RNA, 19 nt, Artificial Sequence
  Synthetic Oligonucleotide
ugaaacggaaacgggacuc

SEQ ID NO: 4125 - RNA, 19 nt, Artificial Sequence
  Synthetic Oligonucleotide
ugaaacggaaacgggacuu

SEQ ID NO: 4126 - RNA, 19 nt, Artificial Sequence
  Synthetic Oligonucleotide
ugaaacgaaaacgggacua

SEQ ID NO: 4127 - RNA, 19 nt, Artificial Sequence
  Synthetic Oligonucleotide
ugaaacgaaaacggaacuc

SEQ ID NO: 4128 - RNA, 19 nt, Artificial Sequence
  Synthetic Oligonucleotide
ugaaacgaaaacgagacuc

SEQ ID NO: 4129 - RNA, 19 nt, Artificial Sequence
  Synthetic Oligonucleotide
ugaaacgaaaaagggacuc

SEQ ID NO: 4130 - RNA, 19 nt, Artificial Sequence
  Synthetic Oligonucleotide
ugaaacggaaacggaacuc

SEQ ID NO: 4131 - RNA, 19 nt, Artificial Sequence
  Synthetic Oligonucleotide
ugaaacggaaacgagacuc

SEQ ID NO: 4132 - RNA, 19 nt, Artificial Sequence
  Synthetic Oligonucleotide
ugaaacggaaacgaaacuc

SEQ ID NO: 4133 - RNA, 19 nt, Artificial Sequence
  Synthetic Oligonucleotide
ugaaacggaaaagagacuc

SEQ ID NO: 4134 - RNA, 19 nt, Artificial Sequence
  Synthetic Oligonucleotide
uaaaagcgguuagagguga

SEQ ID NO: 4135 - RNA, 19 nt, Artificial Sequence
  Synthetic Oligonucleotide
uaaaggcaguuagagguga

SEQ ID NO: 4136 - RNA, 19 nt, Artificial Sequence
  Synthetic Oligonucleotide
ugaaagcaguuagagguga

SEQ ID NO: 4137 - RNA, 19 nt, Artificial Sequence
  Synthetic Oligonucleotide
uaaaggcaguuagggguga

SEQ ID NO: 4138 - RNA, 19 nt, Artificial Sequence
  Synthetic Oligonucleotide
uaaaagcaguuagaggaga

SEQ ID NO: 4139 - RNA, 19 nt, Artificial Sequence
  Synthetic Oligonucleotide
uaaaagcagucagagguga

SEQ ID NO: 4140 - RNA, 19 nt, Artificial Sequence
  Synthetic Oligonucleotide
uaaaagcuguuagagguga

SEQ ID NO: 4141 - RNA, 19 nt, Artificial Sequence
  Synthetic Oligonucleotide
uaaaaucaguuagagguga

SEQ ID NO: 4142 - RNA, 19 nt, Artificial Sequence
  Synthetic Oligonucleotide
uaaaagcagucagggguga

SEQ ID NO: 4143 - RNA, 19 nt, Artificial Sequence
  Synthetic Oligonucleotide
uaaaagcagucagaggcga

SEQ ID NO: 4144 - RNA, 19 nt, Artificial Sequence
  Synthetic Oligonucleotide
ucaaagcaguucgagguga

SEQ ID NO: 4145 - RNA, 19 nt, Artificial Sequence
  Synthetic Oligonucleotide
uaaaggcaguucgaggcga

SEQ ID NO: 4146 - RNA, 19 nt, Artificial Sequence
  Synthetic Oligonucleotide
uaaaggcaguccgagguga

SEQ ID NO: 4147 - RNA, 19 nt, Artificial Sequence
  Synthetic Oligonucleotide
uaaaagcaguccgaggcga

SEQ ID NO: 4148 - RNA, 19 nt, Artificial Sequence
  Synthetic Oligonucleotide
aacaagcuguggguauaug

SEQ ID NO: 4149 - RNA, 19 nt, Artificial Sequence
  Synthetic Oligonucleotide
aacaggcuguggauauaug

SEQ ID NO: 4150 - RNA, 19 nt, Artificial Sequence
  Synthetic Oligonucleotide
agcaagcuguggauauaug

SEQ ID NO: 4151 - RNA, 19 nt, Artificial Sequence
  Synthetic Oligonucleotide
aacaagcuguggauauuug

SEQ ID NO: 4152 - RNA, 19 nt, Artificial Sequence
  Synthetic Oligonucleotide
aacaagcuguggacauaug

SEQ ID NO: 4153 - RNA, 19 nt, Artificial Sequence
  Synthetic Oligonucleotide
aacaagcuguagauauaug

SEQ ID NO: 4154 - RNA, 19 nt, Artificial Sequence
  Synthetic Oligonucleotide
aacaagcuguugauauaug

SEQ ID NO: 4155 - RNA, 19 nt, Artificial Sequence
  Synthetic Oligonucleotide
aacaagcaguggauauaug

SEQ ID NO: 4156 - RNA, 19 nt, Artificial Sequence
  Synthetic Oligonucleotide
aacaagccguggauauaug

SEQ ID NO: 4157 - RNA, 19 nt, Artificial Sequence
  Synthetic Oligonucleotide
aacaagcugugggcauaug

SEQ ID NO: 4158 - RNA, 19 nt, Artificial Sequence
  Synthetic Oligonucleotide
agcaagcuguggaaauaug

SEQ ID NO: 4159 - RNA, 19 nt, Artificial Sequence
  Synthetic Oligonucleotide
agcaagcuguggacauaug

SEQ ID NO: 4160 - RNA, 19 nt, Artificial Sequence
  Synthetic Oligonucleotide
agcaagcugugaauauaug

SEQ ID NO: 4161 - RNA, 19 nt, Artificial Sequence
  Synthetic Oligonucleotide
agcaagcuguagauauaug

SEQ ID NO: 4162 - RNA, 19 nt, Artificial Sequence
  Synthetic Oligonucleotide
agcaagccguggauauaug

SEQ ID NO: 4163 - RNA, 19 nt, Artificial Sequence
  Synthetic Oligonucleotide
agcaagccguggguauaug

SEQ ID NO: 4164 - RNA, 19 nt, Artificial Sequence
  Synthetic Oligonucleotide
aacaagcuguugacauaug

SEQ ID NO: 4165 - RNA, 19 nt, Artificial Sequence
  Synthetic Oligonucleotide
aacaagcaguagauauaug

SEQ ID NO: 4166 - RNA, 19 nt, Artificial Sequence
  Synthetic Oligonucleotide
agcaagccguggauauuug

SEQ ID NO: 4167 - RNA, 19 nt, Artificial Sequence
  Synthetic Oligonucleotide
agcaagccguugauauaug

SEQ ID NO: 4168 - RNA, 19 nt, Artificial Sequence
  Synthetic Oligonucleotide
aacaagccguagacauaug

SEQ ID NO: 4169 - RNA, 19 nt, Artificial Sequence
  Synthetic Oligonucleotide
gaacaagcuguggguauau

SEQ ID NO: 4170 - RNA, 19 nt, Artificial Sequence
  Synthetic Oligonucleotide
gaacaggcuguggauauau

SEQ ID NO: 4171 - RNA, 19 nt, Artificial Sequence
  Synthetic Oligonucleotide
gagcaagcuguggauauau

SEQ ID NO: 4172 - RNA, 19 nt, Artificial Sequence
  Synthetic Oligonucleotide
gaacaagcuguggauauuu

SEQ ID NO: 4173 - RNA, 19 nt, Artificial Sequence
  Synthetic Oligonucleotide
gaacaagcuguggacauau

SEQ ID NO: 4174 - RNA, 19 nt, Artificial Sequence
  Synthetic Oligonucleotide
gaacaagcuguagauauau

SEQ ID NO: 4175 - RNA, 19 nt, Artificial Sequence
  Synthetic Oligonucleotide
gaacaagcuguugauauau

SEQ ID NO: 4176 - RNA, 19 nt, Artificial Sequence
  Synthetic Oligonucleotide
gaacaagcaguggauauau

SEQ ID NO: 4177 - RNA, 19 nt, Artificial Sequence
  Synthetic Oligonucleotide
gaacaagccguggauauau

SEQ ID NO: 4178 - RNA, 19 nt, Artificial Sequence
  Synthetic Oligonucleotide
gaacaagcugugggcauau

SEQ ID NO: 4179 - RNA, 19 nt, Artificial Sequence
  Synthetic Oligonucleotide
gagcaagcuguggaaauau

SEQ ID NO: 4180 - RNA, 19 nt, Artificial Sequence
  Synthetic Oligonucleotide
gagcaagcuguggacauau

SEQ ID NO: 4181 - RNA, 19 nt, Artificial Sequence
  Synthetic Oligonucleotide
gagcaagcugugaauauau

SEQ ID NO: 4182 - RNA, 19 nt, Artificial Sequence
  Synthetic Oligonucleotide
gagcaagcuguagauauau

SEQ ID NO: 4183 - RNA, 19 nt, Artificial Sequence
  Synthetic Oligonucleotide
gagcaagccguggauauau

SEQ ID NO: 4184 - RNA, 19 nt, Artificial Sequence
  Synthetic Oligonucleotide
gagcaagccguggguauau

SEQ ID NO: 4185 - RNA, 19 nt, Artificial Sequence
  Synthetic Oligonucleotide
gaacaagcuguugacauau

SEQ ID NO: 4186 - RNA, 19 nt, Artificial Sequence
  Synthetic Oligonucleotide
gaacaagcaguagauauau

SEQ ID NO: 4187 - RNA, 19 nt, Artificial Sequence
  Synthetic Oligonucleotide
gagcaagccguggauauuu

SEQ ID NO: 4188 - RNA, 19 nt, Artificial Sequence
  Synthetic Oligonucleotide
gagcaagccguugauauau

SEQ ID NO: 4189 - RNA, 19 nt, Artificial Sequence
  Synthetic Oligonucleotide
gaacaagccguagacauau

SEQ ID NO: 4190 - RNA, 19 nt, Artificial Sequence
  Synthetic Oligonucleotide
ugaugguugcguacauguu

SEQ ID NO: 4191 - RNA, 19 nt, Artificial Sequence
  Synthetic Oligonucleotide
ugaugguugcauacaugcu

SEQ ID NO: 4192 - RNA, 19 nt, Artificial Sequence
  Synthetic Oligonucleotide
ugauggucgcauacauguu

SEQ ID NO: 4193 - RNA, 19 nt, Artificial Sequence
  Synthetic Oligonucleotide
ugaugguggcauacauguu

SEQ ID NO: 4194 - RNA, 19 nt, Artificial Sequence
  Synthetic Oligonucleotide
ugaugauugcauacauguu

SEQ ID NO: 4195 - RNA, 19 nt, Artificial Sequence
  Synthetic Oligonucleotide
uaaugguugcauacauguu

SEQ ID NO: 4196 - RNA, 19 nt, Artificial Sequence
  Synthetic Oligonucleotide
ugaugguggcauacaugcu

SEQ ID NO: 4197 - RNA, 19 nt, Artificial Sequence
  Synthetic Oligonucleotide
uaaugguggcauacauguu

SEQ ID NO: 4198 - RNA, 19 nt, Artificial Sequence
  Synthetic Oligonucleotide
uaaugguggcauauauguu

SEQ ID NO: 4199 - RNA, 19 nt, Artificial Sequence
  Synthetic Oligonucleotide
acaagcuguggauauaugu

SEQ ID NO: 4200 - RNA, 19 nt, Artificial Sequence
  Synthetic Oligonucleotide
acaagcuguggguauaugc

SEQ ID NO: 4201 - RNA, 19 nt, Artificial Sequence
  Synthetic Oligonucleotide
acaggcuguggauauaugc

SEQ ID NO: 4202 - RNA, 19 nt, Artificial Sequence
  Synthetic Oligonucleotide
gcaagcuguggauauaugc

SEQ ID NO: 4203 - RNA, 19 nt, Artificial Sequence
  Synthetic Oligonucleotide
acaagcuguggauauuugc

SEQ ID NO: 4204 - RNA, 19 nt, Artificial Sequence
  Synthetic Oligonucleotide
acaagcuguggacauaugc

SEQ ID NO: 4205 - RNA, 19 nt, Artificial Sequence
  Synthetic Oligonucleotide
acaagcuguagauauaugc

SEQ ID NO: 4206 - RNA, 19 nt, Artificial Sequence
  Synthetic Oligonucleotide
acaagcuguugauauaugc

SEQ ID NO: 4207 - RNA, 19 nt, Artificial Sequence
  Synthetic Oligonucleotide
acaagcaguggauauaugc

SEQ ID NO: 4208 - RNA, 19 nt, Artificial Sequence
  Synthetic Oligonucleotide
acaagccguggauauaugc

SEQ ID NO: 4209 - RNA, 19 nt, Artificial Sequence
  Synthetic Oligonucleotide
acaagcugugggcauaugc

SEQ ID NO: 4210 - RNA, 19 nt, Artificial Sequence
  Synthetic Oligonucleotide
acaagccguggauauaugu

SEQ ID NO: 4211 - RNA, 19 nt, Artificial Sequence
  Synthetic Oligonucleotide
gcaagcuguggaaauaugc

SEQ ID NO: 4212 - RNA, 19 nt, Artificial Sequence
  Synthetic Oligonucleotide
gcaagcuguggacauaugc

SEQ ID NO: 4213 - RNA, 19 nt, Artificial Sequence
  Synthetic Oligonucleotide
gcaagcugugaauauaugc

SEQ ID NO: 4214 - RNA, 19 nt, Artificial Sequence
  Synthetic Oligonucleotide
gcaagcuguagauauaugc

SEQ ID NO: 4215 - RNA, 19 nt, Artificial Sequence
  Synthetic Oligonucleotide
gcaagccguggauauaugc

SEQ ID NO: 4216 - RNA, 19 nt, Artificial Sequence
  Synthetic Oligonucleotide
gcaagccguggguauaugc

SEQ ID NO: 4217 - RNA, 19 nt, Artificial Sequence
  Synthetic Oligonucleotide
acaagcuguugacauaugc

SEQ ID NO: 4218 - RNA, 19 nt, Artificial Sequence
  Synthetic Oligonucleotide
acaagcaguagauauaugc

SEQ ID NO: 4219 - RNA, 19 nt, Artificial Sequence
  Synthetic Oligonucleotide
gcaagccguggauauuugc

SEQ ID NO: 4220 - RNA, 19 nt, Artificial Sequence
  Synthetic Oligonucleotide
gcaagccguugauauaugc

SEQ ID NO: 4221 - RNA, 19 nt, Artificial Sequence
  Synthetic Oligonucleotide
acaagccguagacauaugc

SEQ ID NO: 4222 - RNA, 19 nt, Artificial Sequence
  Synthetic Oligonucleotide
ugguugcauacauguugga

SEQ ID NO: 4223 - RNA, 19 nt, Artificial Sequence
  Synthetic Oligonucleotide
ugguugcguacauguuaga

SEQ ID NO: 4224 - RNA, 19 nt, Artificial Sequence
  Synthetic Oligonucleotide
ugguugcauacauguuaaa

SEQ ID NO: 4225 - RNA, 19 nt, Artificial Sequence
  Synthetic Oligonucleotide
ugguugcauacaugcuaga

SEQ ID NO: 4226 - RNA, 19 nt, Artificial Sequence
  Synthetic Oligonucleotide
uggucgcauacauguuaga

SEQ ID NO: 4227 - RNA, 19 nt, Artificial Sequence
  Synthetic Oligonucleotide
ugauugcauacauguuaga

SEQ ID NO: 4228 - RNA, 19 nt, Artificial Sequence
  Synthetic Oligonucleotide
ugguggcauacauguugga

SEQ ID NO: 4229 - RNA, 19 nt, Artificial Sequence
  Synthetic Oligonucleotide
ugguggcauauauguugga

SEQ ID NO: 4230 - RNA, 19 nt, Artificial Sequence
  Synthetic Oligonucleotide
ugguggcauacaugcuaga

SEQ ID NO: 4231 - RNA, 19 nt, Artificial Sequence
  Synthetic Oligonucleotide
augguugcauacauguugg

SEQ ID NO: 4232 - RNA, 19 nt, Artificial Sequence
  Synthetic Oligonucleotide
augguugcguacauguuag

SEQ ID NO: 4233 - RNA, 19 nt, Artificial Sequence
  Synthetic Oligonucleotide
augguugcauacauguuaa

SEQ ID NO: 4234 - RNA, 19 nt, Artificial Sequence
  Synthetic Oligonucleotide
augguugcauacaugcuag

SEQ ID NO: 4235 - RNA, 19 nt, Artificial Sequence
  Synthetic Oligonucleotide
auggucgcauacauguuag

SEQ ID NO: 4236 - RNA, 19 nt, Artificial Sequence
  Synthetic Oligonucleotide
augauugcauacauguuag

SEQ ID NO: 4237 - RNA, 19 nt, Artificial Sequence
  Synthetic Oligonucleotide
augguggcauacauguugg

SEQ ID NO: 4238 - RNA, 19 nt, Artificial Sequence
  Synthetic Oligonucleotide
augguggcauauauguugg

SEQ ID NO: 4239 - RNA, 19 nt, Artificial Sequence
  Synthetic Oligonucleotide
augguggcauacaugcuag

SEQ ID NO: 4240 - RNA, 19 nt, Artificial Sequence
  Synthetic Oligonucleotide
uugaugguugcguacaugu

SEQ ID NO: 4241 - RNA, 19 nt, Artificial Sequence
  Synthetic Oligonucleotide
uugaugguugcauacaugc

SEQ ID NO: 4242 - RNA, 19 nt, Artificial Sequence
  Synthetic Oligonucleotide
uugauggucgcauacaugu

SEQ ID NO: 4243 - RNA, 19 nt, Artificial Sequence
  Synthetic Oligonucleotide
uugaugguggcauacaugu

SEQ ID NO: 4244 - RNA, 19 nt, Artificial Sequence
  Synthetic Oligonucleotide
uugaugauugcauacaugu

SEQ ID NO: 4245 - RNA, 19 nt, Artificial Sequence
  Synthetic Oligonucleotide
uuaaugguugcauacaugu

SEQ ID NO: 4246 - RNA, 19 nt, Artificial Sequence
  Synthetic Oligonucleotide
cugaugguugcauacaugu

SEQ ID NO: 4247 - RNA, 19 nt, Artificial Sequence
  Synthetic Oligonucleotide
uugaugguggcauacaugc

SEQ ID NO: 4248 - RNA, 19 nt, Artificial Sequence
  Synthetic Oligonucleotide
uuaaugguggcauacaugu

SEQ ID NO: 4249 - RNA, 19 nt, Artificial Sequence
  Synthetic Oligonucleotide
cugaugguggcauacaugu

SEQ ID NO: 4250 - RNA, 19 nt, Artificial Sequence
  Synthetic Oligonucleotide
uuaaugguggcauauaugu

SEQ ID NO: 4251 - RNA, 19 nt, Artificial Sequence
  Synthetic Oligonucleotide
uaaaacauggaacuuuugg

SEQ ID NO: 4252 - RNA, 19 nt, Artificial Sequence
  Synthetic Oligonucleotide
uaaaacaugggaccuuugg

SEQ ID NO: 4253 - RNA, 19 nt, Artificial Sequence
  Synthetic Oligonucleotide
uaaagcauggaaccuuugg

SEQ ID NO: 4254 - RNA, 19 nt, Artificial Sequence
  Synthetic Oligonucleotide
ugaaacauggaaccuuugg

SEQ ID NO: 4255 - RNA, 19 nt, Artificial Sequence
  Synthetic Oligonucleotide
uaaagcaugggacuuuugg

SEQ ID NO: 4256 - RNA, 19 nt, Artificial Sequence
  Synthetic Oligonucleotide
uaaaacauggaaccuuuag

SEQ ID NO: 4257 - RNA, 19 nt, Artificial Sequence
  Synthetic Oligonucleotide
uaaaacauggaaccuucgg

SEQ ID NO: 4258 - RNA, 19 nt, Artificial Sequence
  Synthetic Oligonucleotide
uaaaacauggaaccuuwgg

SEQ ID NO: 4259 - RNA, 19 nt, Artificial Sequence
  Synthetic Oligonucleotide
uaaaacauggaacauuugg

SEQ ID NO: 4260 - RNA, 19 nt, Artificial Sequence
  Synthetic Oligonucleotide
uaaaacaugguaccuuugg

SEQ ID NO: 4261 - RNA, 19 nt, Artificial Sequence
  Synthetic Oligonucleotide
uaaaacacggaaccuuugg

SEQ ID NO: 4262 - RNA, 19 nt, Artificial Sequence
  Synthetic Oligonucleotide
uaaaaaauggaaccuuugg

SEQ ID NO: 4263 - RNA, 19 nt, Artificial Sequence
  Synthetic Oligonucleotide
uaaaacacgggaccuuugg

SEQ ID NO: 4264 - RNA, 19 nt, Artificial Sequence
  Synthetic Oligonucleotide
uaaagcacggaaccuuugg

SEQ ID NO: 4265 - RNA, 19 nt, Artificial Sequence
  Synthetic Oligonucleotide
uaagacauggaaccuucgg

SEQ ID NO: 4266 - RNA, 19 nt, Artificial Sequence
  Synthetic Oligonucleotide
ugaaacacgggaccuuugg

SEQ ID NO: 4267 - RNA, 19 nt, Artificial Sequence
  Synthetic Oligonucleotide
uaaaacauggaacauucgg

SEQ ID NO: 4268 - RNA, 19 nt, Artificial Sequence
  Synthetic Oligonucleotide
uaaaacacggaaccuucgg

SEQ ID NO: 4269 - RNA, 19 nt, Artificial Sequence
  Synthetic Oligonucleotide
uaaaacacggaacauucgg

SEQ ID NO: 4270 - RNA, 19 nt, Artificial Sequence
  Synthetic Oligonucleotide
uuaaaacauggaacuuuug

SEQ ID NO: 4271 - RNA, 19 nt, Artificial Sequence
  Synthetic Oligonucleotide
uuaaaacaugggaccuuug

SEQ ID NO: 4272 - RNA, 19 nt, Artificial Sequence
  Synthetic Oligonucleotide
uuaaagcauggaaccuuug

SEQ ID NO: 4273 - RNA, 19 nt, Artificial Sequence
  Synthetic Oligonucleotide
uugaaacauggaaccuuug

SEQ ID NO: 4274 - RNA, 19 nt, Artificial Sequence
  Synthetic Oligonucleotide
uuaaagcaugggacuuuug

SEQ ID NO: 4275 - RNA, 19 nt, Artificial Sequence
  Synthetic Oligonucleotide
uuaaaacauggaaccuuua

SEQ ID NO: 4276 - RNA, 19 nt, Artificial Sequence
  Synthetic Oligonucleotide
uuaaaacauggaaccuucg

SEQ ID NO: 4277 - RNA, 19 nt, Artificial Sequence
  Synthetic Oligonucleotide
uuaaaacauggaaccuuwg

SEQ ID NO: 4278 - RNA, 19 nt, Artificial Sequence
  Synthetic Oligonucleotide
uuaaaacauggaacauuug

SEQ ID NO: 4279 - RNA, 19 nt, Artificial Sequence
  Synthetic Oligonucleotide
uuaaaacaugguaccuuug

SEQ ID NO: 4280 - RNA, 19 nt, Artificial Sequence
  Synthetic Oligonucleotide
uuaaaacacggaaccuuug

SEQ ID NO: 4281 - RNA, 19 nt, Artificial Sequence
  Synthetic Oligonucleotide
uuaaaaaauggaaccuuug

SEQ ID NO: 4282 - RNA, 19 nt, Artificial Sequence
  Synthetic Oligonucleotide
uuaaaacacgggaccuuug

SEQ ID NO: 4283 - RNA, 19 nt, Artificial Sequence
  Synthetic Oligonucleotide
uuaaagcacggaaccuuug

SEQ ID NO: 4284 - RNA, 19 nt, Artificial Sequence
  Synthetic Oligonucleotide
uuaagacauggaaccuucg

SEQ ID NO: 4285 - RNA, 19 nt, Artificial Sequence
  Synthetic Oligonucleotide
cuaaagcauggaaccuuug

SEQ ID NO: 4286 - RNA, 19 nt, Artificial Sequence
  Synthetic Oligonucleotide
uugaaacacgggaccuuug

SEQ ID NO: 4287 - RNA, 19 nt, Artificial Sequence
  Synthetic Oligonucleotide
uuaaaacauggaacauucg

SEQ ID NO: 4288 - RNA, 19 nt, Artificial Sequence
  Synthetic Oligonucleotide
uuaaaacacggaaccuucg

SEQ ID NO: 4289 - RNA, 19 nt, Artificial Sequence
  Synthetic Oligonucleotide
cuaaaacauggaaccuucg

SEQ ID NO: 4290 - RNA, 19 nt, Artificial Sequence
  Synthetic Oligonucleotide
uuaaaacacggaacauucg

SEQ ID NO: 4291 - RNA, 19 nt, Artificial Sequence
  Synthetic Oligonucleotide
uugcauacauguuggagag

SEQ ID NO: 4292 - RNA, 19 nt, Artificial Sequence
  Synthetic Oligonucleotide
uugcguacauguuagagag

SEQ ID NO: 4293 - RNA, 19 nt, Artificial Sequence
  Synthetic Oligonucleotide
uugcauacauguuagaaag

SEQ ID NO: 4294 - RNA, 19 nt, Artificial Sequence
  Synthetic Oligonucleotide
uugcauacauguuaaagag

SEQ ID NO: 4295 - RNA, 19 nt, Artificial Sequence
  Synthetic Oligonucleotide
ucgcauacauguuagagag

SEQ ID NO: 4296 - RNA, 19 nt, Artificial Sequence
  Synthetic Oligonucleotide
uugcauacauguuggaaag

SEQ ID NO: 4297 - RNA, 19 nt, Artificial Sequence
  Synthetic Oligonucleotide
uggcauacauguuggagag

SEQ ID NO: 4298 - RNA, 19 nt, Artificial Sequence
  Synthetic Oligonucleotide
uugcauacaugcuagaaag

SEQ ID NO: 4299 - RNA, 19 nt, Artificial Sequence
  Synthetic Oligonucleotide
uggcauacauguuggaaag

SEQ ID NO: 4300 - RNA, 19 nt, Artificial Sequence
  Synthetic Oligonucleotide
uggcauacaugcuagaaag

SEQ ID NO: 4301 - RNA, 19 nt, Artificial Sequence
  Synthetic Oligonucleotide
gaugguugcauacauguug

SEQ ID NO: 4302 - RNA, 19 nt, Artificial Sequence
  Synthetic Oligonucleotide
gaugguugcguacauguua

SEQ ID NO: 4303 - RNA, 19 nt, Artificial Sequence
  Synthetic Oligonucleotide
gaugguugcauacaugcua

SEQ ID NO: 4304 - RNA, 19 nt, Artificial Sequence
  Synthetic Oligonucleotide
gauggucgcauacauguua

SEQ ID NO: 4305 - RNA, 19 nt, Artificial Sequence
  Synthetic Oligonucleotide
gaugauugcauacauguua

SEQ ID NO: 4306 - RNA, 19 nt, Artificial Sequence
  Synthetic Oligonucleotide
aaugguugcauacauguua

SEQ ID NO: 4307 - RNA, 19 nt, Artificial Sequence
  Synthetic Oligonucleotide
gaugguggcauacauguug

SEQ ID NO: 4308 - RNA, 19 nt, Artificial Sequence
  Synthetic Oligonucleotide
aaugguugcauacauguug

SEQ ID NO: 4309 - RNA, 19 nt, Artificial Sequence
  Synthetic Oligonucleotide
gaugguggcauacaugcua

SEQ ID NO: 4310 - RNA, 19 nt, Artificial Sequence
  Synthetic Oligonucleotide
aaugguggcauacauguug

SEQ ID NO: 4311 - RNA, 19 nt, Artificial Sequence
  Synthetic Oligonucleotide
guugcauacauguuggaga

SEQ ID NO: 4312 - RNA, 19 nt, Artificial Sequence
  Synthetic Oligonucleotide
guugcguacauguuagaga

SEQ ID NO: 4313 - RNA, 19 nt, Artificial Sequence
  Synthetic Oligonucleotide
guugcauacauguuagaaa

SEQ ID NO: 4314 - RNA, 19 nt, Artificial Sequence
  Synthetic Oligonucleotide
guugcauacauguuaaaga

SEQ ID NO: 4315 - RNA, 19 nt, Artificial Sequence
  Synthetic Oligonucleotide
gucgcauacauguuagaga

SEQ ID NO: 4316 - RNA, 19 nt, Artificial Sequence
  Synthetic Oligonucleotide
auugcauacauguuagaga

SEQ ID NO: 4317 - RNA, 19 nt, Artificial Sequence
  Synthetic Oligonucleotide
guugcauacauguuggaaa

SEQ ID NO: 4318 - RNA, 19 nt, Artificial Sequence
  Synthetic Oligonucleotide
guggcauacauguuggaga

SEQ ID NO: 4319 - RNA, 19 nt, Artificial Sequence
  Synthetic Oligonucleotide
guugcauacaugcuagaaa

SEQ ID NO: 4320 - RNA, 19 nt, Artificial Sequence
  Synthetic Oligonucleotide
guggcauacauguuggaaa

SEQ ID NO: 4321 - RNA, 19 nt, Artificial Sequence
  Synthetic Oligonucleotide
guggcauacaugcuagaaa

SEQ ID NO: 4322 - RNA, 19 nt, Artificial Sequence
  Synthetic Oligonucleotide
gguugcauacauguuggag

SEQ ID NO: 4323 - RNA, 19 nt, Artificial Sequence
  Synthetic Oligonucleotide
gguugcguacauguuagag

SEQ ID NO: 4324 - RNA, 19 nt, Artificial Sequence
  Synthetic Oligonucleotide
gguugcauacauguuagaa

SEQ ID NO: 4325 - RNA, 19 nt, Artificial Sequence
  Synthetic Oligonucleotide
gguugcauacauguuaaag

SEQ ID NO: 4326 - RNA, 19 nt, Artificial Sequence
  Synthetic Oligonucleotide
ggucgcauacauguuagag

SEQ ID NO: 4327 - RNA, 19 nt, Artificial Sequence
  Synthetic Oligonucleotide
gauugcauacauguuagag

SEQ ID NO: 4328 - RNA, 19 nt, Artificial Sequence
  Synthetic Oligonucleotide
gguugcauacauguuggaa

SEQ ID NO: 4329 - RNA, 19 nt, Artificial Sequence
  Synthetic Oligonucleotide
gguggcauacauguuggag

SEQ ID NO: 4330 - RNA, 19 nt, Artificial Sequence
  Synthetic Oligonucleotide
gguugcauacaugcuagaa

SEQ ID NO: 4331 - RNA, 19 nt, Artificial Sequence
  Synthetic Oligonucleotide
gguggcauacauguuggaa

SEQ ID NO: 4332 - RNA, 19 nt, Artificial Sequence
  Synthetic Oligonucleotide
gguggcauacaugcuagaa

SEQ ID NO: 4333 - RNA, 19 nt, Artificial Sequence
  Synthetic Oligonucleotide
guuaaaacauggaacuuuu

SEQ ID NO: 4334 - RNA, 19 nt, Artificial Sequence
  Synthetic Oligonucleotide
guuaaaacaugggaccuuu

SEQ ID NO: 4335 - RNA, 19 nt, Artificial Sequence
  Synthetic Oligonucleotide
guuaaagcauggaaccuuu

SEQ ID NO: 4336 - RNA, 19 nt, Artificial Sequence
  Synthetic Oligonucleotide
guugaaacauggaaccuuu

SEQ ID NO: 4337 - RNA, 19 nt, Artificial Sequence
  Synthetic Oligonucleotide
guuaaagcaugggacuuuu

SEQ ID NO: 4338 - RNA, 19 nt, Artificial Sequence
  Synthetic Oligonucleotide
guuaaaacauggaaccuuc

SEQ ID NO: 4339 - RNA, 19 nt, Artificial Sequence
  Synthetic Oligonucleotide
guuaaaacauggaaccuuw

SEQ ID NO: 4340 - RNA, 19 nt, Artificial Sequence
  Synthetic Oligonucleotide
guuaaaacauggaacauuu

SEQ ID NO: 4341 - RNA, 19 nt, Artificial Sequence
  Synthetic Oligonucleotide
guuaaaacaugguaccuuu

SEQ ID NO: 4342 - RNA, 19 nt, Artificial Sequence
  Synthetic Oligonucleotide
guuaaaacacggaaccuuu

SEQ ID NO: 4343 - RNA, 19 nt, Artificial Sequence
  Synthetic Oligonucleotide
guuaaaaaauggaaccuuu

SEQ ID NO: 4344 - RNA, 19 nt, Artificial Sequence
  Synthetic Oligonucleotide
auuaaaacauggaaccuuu

SEQ ID NO: 4345 - RNA, 19 nt, Artificial Sequence
  Synthetic Oligonucleotide
guuaaagcacggaaccuuu

SEQ ID NO: 4346 - RNA, 19 nt, Artificial Sequence
  Synthetic Oligonucleotide
guuaagacauggaaccuuc

SEQ ID NO: 4347 - RNA, 19 nt, Artificial Sequence
  Synthetic Oligonucleotide
gcuaaagcauggaaccuuu

SEQ ID NO: 4348 - RNA, 19 nt, Artificial Sequence
  Synthetic Oligonucleotide
guuaaaacauggaacauuc

SEQ ID NO: 4349 - RNA, 19 nt, Artificial Sequence
  Synthetic Oligonucleotide
gcuaaaacauggaaccuuc

SEQ ID NO: 4350 - RNA, 19 nt, Artificial Sequence
  Synthetic Oligonucleotide
auuaaaacauggaaccuuc

SEQ ID NO: 4351 - RNA, 19 nt, Artificial Sequence
  Synthetic Oligonucleotide
auuaaaacacggaaccuuu

SEQ ID NO: 4352 - RNA, 19 nt, Artificial Sequence
  Synthetic Oligonucleotide
auuaaaacacgggaccuuu

SEQ ID NO: 4353 - RNA, 19 nt, Artificial Sequence
  Synthetic Oligonucleotide
guuaaaacacggaacauuc

SEQ ID NO: 4354 - RNA, 19 nt, Artificial Sequence
  Synthetic Oligonucleotide
auuaaaacacggaaccuuc

SEQ ID NO: 4355 - RNA, 19 nt, Artificial Sequence
  Synthetic Oligonucleotide
gaaacgaaaaugggacucu

SEQ ID NO: 4356 - RNA, 19 nt, Artificial Sequence
  Synthetic Oligonucleotide
gaaacggaaacgggacucu

SEQ ID NO: 4357 - RNA, 19 nt, Artificial Sequence
  Synthetic Oligonucleotide
gaaacggaaacgggacuuu

SEQ ID NO: 4358 - RNA, 19 nt, Artificial Sequence
  Synthetic Oligonucleotide
gaaacgaaaacgggacucc

SEQ ID NO: 4359 - RNA, 19 nt, Artificial Sequence
  Synthetic Oligonucleotide
gaaacgaaaacgggacuau

SEQ ID NO: 4360 - RNA, 19 nt, Artificial Sequence
  Synthetic Oligonucleotide
gaaacgaaaacggaacucu

SEQ ID NO: 4361 - RNA, 19 nt, Artificial Sequence
  Synthetic Oligonucleotide
gaaacgaaaacgagacucu

SEQ ID NO: 4362 - RNA, 19 nt, Artificial Sequence
  Synthetic Oligonucleotide
gaaacgaaaaagggacucu

SEQ ID NO: 4363 - RNA, 19 nt, Artificial Sequence
  Synthetic Oligonucleotide
gaaacggaaacggaacucu

SEQ ID NO: 4364 - RNA, 19 nt, Artificial Sequence
  Synthetic Oligonucleotide
gaaacggaaacgagacucu

SEQ ID NO: 4365 - RNA, 19 nt, Artificial Sequence
  Synthetic Oligonucleotide
gaaacggaaacgaaacucu

SEQ ID NO: 4366 - RNA, 19 nt, Artificial Sequence
  Synthetic Oligonucleotide
gaaacggaaaagagacucu

SEQ ID NO: 4367 - RNA, 19 nt, Artificial Sequence
  Synthetic Oligonucleotide
aaacgaaaaugggacucua

SEQ ID NO: 4368 - RNA, 19 nt, Artificial Sequence
  Synthetic Oligonucleotide
aaacggaaacgggacucua

SEQ ID NO: 4369 - RNA, 19 nt, Artificial Sequence
  Synthetic Oligonucleotide
aaacggaaacgggacuuua

SEQ ID NO: 4370 - RNA, 19 nt, Artificial Sequence
  Synthetic Oligonucleotide
aaacgaaaacgggacucca

SEQ ID NO: 4371 - RNA, 19 nt, Artificial Sequence
  Synthetic Oligonucleotide
aaacgaaaacgggacuaua

SEQ ID NO: 4372 - RNA, 19 nt, Artificial Sequence
  Synthetic Oligonucleotide
aaacgaaaacggaacucua

SEQ ID NO: 4373 - RNA, 19 nt, Artificial Sequence
  Synthetic Oligonucleotide
aaacgaaaacgagacucua

SEQ ID NO: 4374 - RNA, 19 nt, Artificial Sequence
  Synthetic Oligonucleotide
aaacgaaaaagggacucua

SEQ ID NO: 4375 - RNA, 19 nt, Artificial Sequence
  Synthetic Oligonucleotide
aaacggaaacggaacucua

SEQ ID NO: 4376 - RNA, 19 nt, Artificial Sequence
  Synthetic Oligonucleotide
aaacggaaacgagacucua

SEQ ID NO: 4377 - RNA, 19 nt, Artificial Sequence
  Synthetic Oligonucleotide
aaacggaaacgaaacucua

SEQ ID NO: 4378 - RNA, 19 nt, Artificial Sequence
  Synthetic Oligonucleotide
aaacggaaaagagacucua

SEQ ID NO: 4379 - RNA, 19 nt, Artificial Sequence
  Synthetic Oligonucleotide
aacgaaaaugggacucuag

SEQ ID NO: 4380 - RNA, 19 nt, Artificial Sequence
  Synthetic Oligonucleotide
aacggaaacgggacucuag

SEQ ID NO: 4381 - RNA, 19 nt, Artificial Sequence
  Synthetic Oligonucleotide
aacggaaacgggacuuuag

SEQ ID NO: 4382 - RNA, 19 nt, Artificial Sequence
  Synthetic Oligonucleotide
aacgaaaacgggacucuaa

SEQ ID NO: 4383 - RNA, 19 nt, Artificial Sequence
  Synthetic Oligonucleotide
aacgaaaacgggacuccag

SEQ ID NO: 4384 - RNA, 19 nt, Artificial Sequence
  Synthetic Oligonucleotide
aacgaaaacgggacuauag

SEQ ID NO: 4385 - RNA, 19 nt, Artificial Sequence
  Synthetic Oligonucleotide
aacgaaaacggaacucuag

SEQ ID NO: 4386 - RNA, 19 nt, Artificial Sequence
  Synthetic Oligonucleotide
aacgaaaacgagacucuag

SEQ ID NO: 4387 - RNA, 19 nt, Artificial Sequence
  Synthetic Oligonucleotide
aacgaaaaagggacucuag

SEQ ID NO: 4388 - RNA, 19 nt, Artificial Sequence
  Synthetic Oligonucleotide
aacggaaacggaacucuag

SEQ ID NO: 4389 - RNA, 19 nt, Artificial Sequence
  Synthetic Oligonucleotide
aacggaaacgagacucuag

SEQ ID NO: 4390 - RNA, 19 nt, Artificial Sequence
  Synthetic Oligonucleotide
aacggaaacgaaacucuag

SEQ ID NO: 4391 - RNA, 19 nt, Artificial Sequence
  Synthetic Oligonucleotide
aacggaaaagagacucuag

SEQ ID NO: 4392 - RNA, 19 nt, Artificial Sequence
  Synthetic Oligonucleotide
acgaaaaugggacucuagc

SEQ ID NO: 4393 - RNA, 19 nt, Artificial Sequence
  Synthetic Oligonucleotide
acggaaacgggacucuagc

SEQ ID NO: 4394 - RNA, 19 nt, Artificial Sequence
  Synthetic Oligonucleotide
acggaaacgggacuuuagc

SEQ ID NO: 4395 - RNA, 19 nt, Artificial Sequence
  Synthetic Oligonucleotide
acgaaaacgggacucuaac

SEQ ID NO: 4396 - RNA, 19 nt, Artificial Sequence
  Synthetic Oligonucleotide
acgaaaacgggacuccagc

SEQ ID NO: 4397 - RNA, 19 nt, Artificial Sequence
  Synthetic Oligonucleotide
acgaaaacgggacuauagc

SEQ ID NO: 4398 - RNA, 19 nt, Artificial Sequence
  Synthetic Oligonucleotide
acgaaaacggaacucuagc

SEQ ID NO: 4399 - RNA, 19 nt, Artificial Sequence
  Synthetic Oligonucleotide
acgaaaacgagacucuagc

SEQ ID NO: 4400 - RNA, 19 nt, Artificial Sequence
  Synthetic Oligonucleotide
acgaaaaagggacucuagc

SEQ ID NO: 4401 - RNA, 19 nt, Artificial Sequence
  Synthetic Oligonucleotide
acggaaacggaacucuagc

SEQ ID NO: 4402 - RNA, 19 nt, Artificial Sequence
  Synthetic Oligonucleotide
acggaaacgagacucuagc

SEQ ID NO: 4403 - RNA, 19 nt, Artificial Sequence
  Synthetic Oligonucleotide
acggaaacgaaacucuagc

SEQ ID NO: 4404 - RNA, 19 nt, Artificial Sequence
  Synthetic Oligonucleotide
acggaaaagagacucuagc

SEQ ID NO: 4405 - RNA, 19 nt, Artificial Sequence
  Synthetic Oligonucleotide
cgaaaaugggacucuagca

SEQ ID NO: 4406 - RNA, 19 nt, Artificial Sequence
  Synthetic Oligonucleotide
cggaaacgggacucuagca

SEQ ID NO: 4407 - RNA, 19 nt, Artificial Sequence
  Synthetic Oligonucleotide
cggaaacgggacuuuagca

SEQ ID NO: 4408 - RNA, 19 nt, Artificial Sequence
  Synthetic Oligonucleotide
cgaaaacgggacucuaaca

SEQ ID NO: 4409 - RNA, 19 nt, Artificial Sequence
  Synthetic Oligonucleotide
cgaaaacgggacuccagca

SEQ ID NO: 4410 - RNA, 19 nt, Artificial Sequence
  Synthetic Oligonucleotide
cgaaaacgggacuauagca

SEQ ID NO: 4411 - RNA, 19 nt, Artificial Sequence
  Synthetic Oligonucleotide
cgaaaacggaacucuagca

SEQ ID NO: 4412 - RNA, 19 nt, Artificial Sequence
  Synthetic Oligonucleotide
cgaaaacgagacucuagca

SEQ ID NO: 4413 - RNA, 19 nt, Artificial Sequence
  Synthetic Oligonucleotide
cgaaaaagggacucuagca

SEQ ID NO: 4414 - RNA, 19 nt, Artificial Sequence
  Synthetic Oligonucleotide
cggaaacggaacucuagca

SEQ ID NO: 4415 - RNA, 19 nt, Artificial Sequence
  Synthetic Oligonucleotide
cggaaacgagacucuagca

SEQ ID NO: 4416 - RNA, 19 nt, Artificial Sequence
  Synthetic Oligonucleotide
cggaaacgaaacucuagca

SEQ ID NO: 4417 - RNA, 19 nt, Artificial Sequence
  Synthetic Oligonucleotide
cggaaaagagacucuagca

SEQ ID NO: 4418 - RNA, 19 nt, Artificial Sequence
  Synthetic Oligonucleotide
gaaaaugggacucuagcau

SEQ ID NO: 4419 - RNA, 19 nt, Artificial Sequence
  Synthetic Oligonucleotide
ggaaacgggacucuagcau

SEQ ID NO: 4420 - RNA, 19 nt, Artificial Sequence
  Synthetic Oligonucleotide
ggaaacgggacuuuagcau

SEQ ID NO: 4421 - RNA, 19 nt, Artificial Sequence
  Synthetic Oligonucleotide
gaaaacgggacucuagcag

SEQ ID NO: 4422 - RNA, 19 nt, Artificial Sequence
  Synthetic Oligonucleotide
gaaaacgggacucuaacau

SEQ ID NO: 4423 - RNA, 19 nt, Artificial Sequence
  Synthetic Oligonucleotide
gaaaacgggacuccagcau

SEQ ID NO: 4424 - RNA, 19 nt, Artificial Sequence
  Synthetic Oligonucleotide
gaaaacgggacuauagcau

SEQ ID NO: 4425 - RNA, 19 nt, Artificial Sequence
  Synthetic Oligonucleotide
gaaaacggaacucuagcau

SEQ ID NO: 4426 - RNA, 19 nt, Artificial Sequence
  Synthetic Oligonucleotide
gaaaacgagacucuagcau

SEQ ID NO: 4427 - RNA, 19 nt, Artificial Sequence
  Synthetic Oligonucleotide
gaaaaagggacucuagcau

SEQ ID NO: 4428 - RNA, 19 nt, Artificial Sequence
  Synthetic Oligonucleotide
ggaaacggaacucuagcau

SEQ ID NO: 4429 - RNA, 19 nt, Artificial Sequence
  Synthetic Oligonucleotide
ggaaacgagacucuagcau

SEQ ID NO: 4430 - RNA, 19 nt, Artificial Sequence
  Synthetic Oligonucleotide
ggaaacgaaacucuagcau

SEQ ID NO: 4431 - RNA, 19 nt, Artificial Sequence
  Synthetic Oligonucleotide
ggaaaagagacucuagcau

SEQ ID NO: 4432 - RNA, 19 nt, Artificial Sequence
  Synthetic Oligonucleotide
aaaacgggacucuagcaug

SEQ ID NO: 4433 - RNA, 19 nt, Artificial Sequence
  Synthetic Oligonucleotide
aaaaugggacucuagcaua

SEQ ID NO: 4434 - RNA, 19 nt, Artificial Sequence
  Synthetic Oligonucleotide
gaaacgggacucuagcaua

SEQ ID NO: 4435 - RNA, 19 nt, Artificial Sequence
  Synthetic Oligonucleotide
gaaacgggacuuuagcaua

SEQ ID NO: 4436 - RNA, 19 nt, Artificial Sequence
  Synthetic Oligonucleotide
aaaacgggacucuagcaga

SEQ ID NO: 4437 - RNA, 19 nt, Artificial Sequence
  Synthetic Oligonucleotide
aaaacgggacucuaacaua

SEQ ID NO: 4438 - RNA, 19 nt, Artificial Sequence
  Synthetic Oligonucleotide
aaaacgggacuccagcaua

SEQ ID NO: 4439 - RNA, 19 nt, Artificial Sequence
  Synthetic Oligonucleotide
aaaacgggacuauagcaua

SEQ ID NO: 4440 - RNA, 19 nt, Artificial Sequence
  Synthetic Oligonucleotide
aaaacggaacucuagcaua

SEQ ID NO: 4441 - RNA, 19 nt, Artificial Sequence
  Synthetic Oligonucleotide
aaaacgagacucuagcaua

SEQ ID NO: 4442 - RNA, 19 nt, Artificial Sequence
  Synthetic Oligonucleotide
aaaaagggacucuagcaua

SEQ ID NO: 4443 - RNA, 19 nt, Artificial Sequence
  Synthetic Oligonucleotide
gaaacggaacucuagcaua

SEQ ID NO: 4444 - RNA, 19 nt, Artificial Sequence
  Synthetic Oligonucleotide
gaaacgagacucuagcaua

SEQ ID NO: 4445 - RNA, 19 nt, Artificial Sequence
  Synthetic Oligonucleotide
gaaacgaaacucuagcaua

SEQ ID NO: 4446 - RNA, 19 nt, Artificial Sequence
  Synthetic Oligonucleotide
gaaaagagacucuagcaua

SEQ ID NO: 4447 - RNA, 19 nt, Artificial Sequence
  Synthetic Oligonucleotide
aacauggaaccuuuggucc

SEQ ID NO: 4448 - RNA, 19 nt, Artificial Sequence
  Synthetic Oligonucleotide
aacauggaacuuuuggccc

SEQ ID NO: 4449 - RNA, 19 nt, Artificial Sequence
  Synthetic Oligonucleotide
aacaugggaccuuuggccc

SEQ ID NO: 4450 - RNA, 19 nt, Artificial Sequence
  Synthetic Oligonucleotide
agcauggaaccuuuggccc

SEQ ID NO: 4451 - RNA, 19 nt, Artificial Sequence
  Synthetic Oligonucleotide
aacaugggaccuuuggucc

SEQ ID NO: 4452 - RNA, 19 nt, Artificial Sequence
  Synthetic Oligonucleotide
agcauggaaccuuuggucc

SEQ ID NO: 4453 - RNA, 19 nt, Artificial Sequence
  Synthetic Oligonucleotide
aacauggaaccuuuggacc

SEQ ID NO: 4454 - RNA, 19 nt, Artificial Sequence
  Synthetic Oligonucleotide
aacauggaaccuuugggcc

SEQ ID NO: 4455 - RNA, 19 nt, Artificial Sequence
  Synthetic Oligonucleotide
aacauggaaccuuuagccc

SEQ ID NO: 4456 - RNA, 19 nt, Artificial Sequence
  Synthetic Oligonucleotide
aacauggaaccuucggccc

SEQ ID NO: 4457 - RNA, 19 nt, Artificial Sequence
  Synthetic Oligonucleotide
aacauggaaccuuwggccc

SEQ ID NO: 4458 - RNA, 19 nt, Artificial Sequence
  Synthetic Oligonucleotide
aacauggaacauuuggccc

SEQ ID NO: 4459 - RNA, 19 nt, Artificial Sequence
  Synthetic Oligonucleotide
aacaugguaccuuuggccc

SEQ ID NO: 4460 - RNA, 19 nt, Artificial Sequence
  Synthetic Oligonucleotide
aacacggaaccuuuggccc

SEQ ID NO: 4461 - RNA, 19 nt, Artificial Sequence
  Synthetic Oligonucleotide
aaaauggaaccuuuggccc

SEQ ID NO: 4462 - RNA, 19 nt, Artificial Sequence
  Synthetic Oligonucleotide
aacauggaaccuucggucc

SEQ ID NO: 4463 - RNA, 19 nt, Artificial Sequence
  Synthetic Oligonucleotide
aacacgggaccuuuggccc

SEQ ID NO: 4464 - RNA, 19 nt, Artificial Sequence
  Synthetic Oligonucleotide
agcacggaaccuuuggccc

SEQ ID NO: 4465 - RNA, 19 nt, Artificial Sequence
  Synthetic Oligonucleotide
gacauggaaccuucggucc

SEQ ID NO: 4466 - RNA, 19 nt, Artificial Sequence
  Synthetic Oligonucleotide
aacauggaacauucggccc

SEQ ID NO: 4467 - RNA, 19 nt, Artificial Sequence
  Synthetic Oligonucleotide
aacacggaaccuucggccc

SEQ ID NO: 4468 - RNA, 19 nt, Artificial Sequence
  Synthetic Oligonucleotide
aacauggaacauucggucc

SEQ ID NO: 4469 - RNA, 19 nt, Artificial Sequence
  Synthetic Oligonucleotide
aaacauggaaccuuugguc

SEQ ID NO: 4470 - RNA, 19 nt, Artificial Sequence
  Synthetic Oligonucleotide
aaacauggaacuuuuggcc

SEQ ID NO: 4471 - RNA, 19 nt, Artificial Sequence
  Synthetic Oligonucleotide
aaacaugggaccuuuggcc

SEQ ID NO: 4472 - RNA, 19 nt, Artificial Sequence
  Synthetic Oligonucleotide
aagcauggaaccuuuggcc

SEQ ID NO: 4473 - RNA, 19 nt, Artificial Sequence
  Synthetic Oligonucleotide
aaacaugggaccuuugguc

SEQ ID NO: 4474 - RNA, 19 nt, Artificial Sequence
  Synthetic Oligonucleotide
aagcauggaaccuuugguc

SEQ ID NO: 4475 - RNA, 19 nt, Artificial Sequence
  Synthetic Oligonucleotide
aaacauggaaccuuuggac

SEQ ID NO: 4476 - RNA, 19 nt, Artificial Sequence
  Synthetic Oligonucleotide
aaacauggaaccuuugggc

SEQ ID NO: 4477 - RNA, 19 nt, Artificial Sequence
  Synthetic Oligonucleotide
aaacauggaaccuuuagcc

SEQ ID NO: 4478 - RNA, 19 nt, Artificial Sequence
  Synthetic Oligonucleotide
aaacauggaaccuucggcc

SEQ ID NO: 4479 - RNA, 19 nt, Artificial Sequence
  Synthetic Oligonucleotide
aaacauggaaccuuwggcc

SEQ ID NO: 4480 - RNA, 19 nt, Artificial Sequence
  Synthetic Oligonucleotide
aaacauggaacauuuggcc

SEQ ID NO: 4481 - RNA, 19 nt, Artificial Sequence
  Synthetic Oligonucleotide
aaacaugguaccuuuggcc

SEQ ID NO: 4482 - RNA, 19 nt, Artificial Sequence
  Synthetic Oligonucleotide
aaacacggaaccuuuggcc

SEQ ID NO: 4483 - RNA, 19 nt, Artificial Sequence
  Synthetic Oligonucleotide
aaaaauggaaccuuuggcc

SEQ ID NO: 4484 - RNA, 19 nt, Artificial Sequence
  Synthetic Oligonucleotide
aaacauggaaccuucgguc

SEQ ID NO: 4485 - RNA, 19 nt, Artificial Sequence
  Synthetic Oligonucleotide
aaacacgggaccuuuggcc

SEQ ID NO: 4486 - RNA, 19 nt, Artificial Sequence
  Synthetic Oligonucleotide
aagcacggaaccuuuggcc

SEQ ID NO: 4487 - RNA, 19 nt, Artificial Sequence
  Synthetic Oligonucleotide
agacauggaaccuucgguc

SEQ ID NO: 4488 - RNA, 19 nt, Artificial Sequence
  Synthetic Oligonucleotide
aaacauggaacauucggcc

SEQ ID NO: 4489 - RNA, 19 nt, Artificial Sequence
  Synthetic Oligonucleotide
aaacacggaaccuucggcc

SEQ ID NO: 4490 - RNA, 19 nt, Artificial Sequence
  Synthetic Oligonucleotide
aaacauggaacauucgguc

SEQ ID NO: 4491 - RNA, 19 nt, Artificial Sequence
  Synthetic Oligonucleotide
aaaacauggaaccuuuggu

SEQ ID NO: 4492 - RNA, 19 nt, Artificial Sequence
  Synthetic Oligonucleotide
aaaacauggaacuuuuggc

SEQ ID NO: 4493 - RNA, 19 nt, Artificial Sequence
  Synthetic Oligonucleotide
aaaacaugggaccuuuggc

SEQ ID NO: 4494 - RNA, 19 nt, Artificial Sequence
  Synthetic Oligonucleotide
aaagcauggaaccuuuggc

SEQ ID NO: 4495 - RNA, 19 nt, Artificial Sequence
  Synthetic Oligonucleotide
gaaacauggaaccuuuggc

SEQ ID NO: 4496 - RNA, 19 nt, Artificial Sequence
  Synthetic Oligonucleotide
aaaacaugggaccuuuggu

SEQ ID NO: 4497 - RNA, 19 nt, Artificial Sequence
  Synthetic Oligonucleotide
aaagcauggaaccuuuggu

SEQ ID NO: 4498 - RNA, 19 nt, Artificial Sequence
  Synthetic Oligonucleotide
aaaacauggaaccuuugga

SEQ ID NO: 4499 - RNA, 19 nt, Artificial Sequence
  Synthetic Oligonucleotide
aaaacauggaaccuuuggg

SEQ ID NO: 4500 - RNA, 19 nt, Artificial Sequence
  Synthetic Oligonucleotide
aaaacauggaaccuuuagc

SEQ ID NO: 4501 - RNA, 19 nt, Artificial Sequence
  Synthetic Oligonucleotide
aaaacauggaaccuucggc

SEQ ID NO: 4502 - RNA, 19 nt, Artificial Sequence
  Synthetic Oligonucleotide
aaaacauggaaccuuwggc

SEQ ID NO: 4503 - RNA, 19 nt, Artificial Sequence
  Synthetic Oligonucleotide
aaaacauggaacauuuggc

SEQ ID NO: 4504 - RNA, 19 nt, Artificial Sequence
  Synthetic Oligonucleotide
aaaacaugguaccuuuggc

SEQ ID NO: 4505 - RNA, 19 nt, Artificial Sequence
  Synthetic Oligonucleotide
aaaacacggaaccuuuggc

SEQ ID NO: 4506 - RNA, 19 nt, Artificial Sequence
  Synthetic Oligonucleotide
aaaaaauggaaccuuuggc

SEQ ID NO: 4507 - RNA, 19 nt, Artificial Sequence
  Synthetic Oligonucleotide
aaaacauggaaccuucggu

SEQ ID NO: 4508 - RNA, 19 nt, Artificial Sequence
  Synthetic Oligonucleotide
aaaacacgggaccuuuggc

SEQ ID NO: 4509 - RNA, 19 nt, Artificial Sequence
  Synthetic Oligonucleotide
aaagcacggaaccuuuggc

SEQ ID NO: 4510 - RNA, 19 nt, Artificial Sequence
  Synthetic Oligonucleotide
aagacauggaaccuucggu

SEQ ID NO: 4511 - RNA, 19 nt, Artificial Sequence
  Synthetic Oligonucleotide
gaaacacgggaccuuuggc

SEQ ID NO: 4512 - RNA, 19 nt, Artificial Sequence
  Synthetic Oligonucleotide
aaaacauggaacauucggc

SEQ ID NO: 4513 - RNA, 19 nt, Artificial Sequence
  Synthetic Oligonucleotide
aaaacacggaaccuucggc

SEQ ID NO: 4514 - RNA, 19 nt, Artificial Sequence
  Synthetic Oligonucleotide
aaaacauggaacauucggu

SEQ ID NO: 4515 - RNA, 19 nt, Artificial Sequence
  Synthetic Oligonucleotide
augagaauacuugugaggg

SEQ ID NO: 4516 - RNA, 19 nt, Artificial Sequence
  Synthetic Oligonucleotide
augaggauacuuguaaggg

SEQ ID NO: 4517 - RNA, 19 nt, Artificial Sequence
  Synthetic Oligonucleotide
augagaauacuuguaagag

SEQ ID NO: 4518 - RNA, 19 nt, Artificial Sequence
  Synthetic Oligonucleotide
augagaauacuuauaaggg

SEQ ID NO: 4519 - RNA, 19 nt, Artificial Sequence
  Synthetic Oligonucleotide
augagaauacucguaaggg

SEQ ID NO: 4520 - RNA, 19 nt, Artificial Sequence
  Synthetic Oligonucleotide
augagaauaccuguaaggg

SEQ ID NO: 4521 - RNA, 19 nt, Artificial Sequence
  Synthetic Oligonucleotide
augagaauacuugugagag

SEQ ID NO: 4522 - RNA, 19 nt, Artificial Sequence
  Synthetic Oligonucleotide
augagaauacucauaaggg

SEQ ID NO: 4523 - RNA, 19 nt, Artificial Sequence
  Synthetic Oligonucleotide
augaggauacugguaagag

SEQ ID NO: 4524 - RNA, 19 nt, Artificial Sequence
  Synthetic Oligonucleotide
augacaauacuugugagag

SEQ ID NO: 4525 - RNA, 19 nt, Artificial Sequence
  Synthetic Oligonucleotide
augagaauacucauaagag

SEQ ID NO: 4526 - RNA, 19 nt, Artificial Sequence
  Synthetic Oligonucleotide
ugagaauacuugugagggg

SEQ ID NO: 4527 - RNA, 19 nt, Artificial Sequence
  Synthetic Oligonucleotide
ugaggauacuuguaagggg

SEQ ID NO: 4528 - RNA, 19 nt, Artificial Sequence
  Synthetic Oligonucleotide
ugagaauacuuguaagagg

SEQ ID NO: 4529 - RNA, 19 nt, Artificial Sequence
  Synthetic Oligonucleotide
ugagaauacuuauaagggg

SEQ ID NO: 4530 - RNA, 19 nt, Artificial Sequence
  Synthetic Oligonucleotide
ugagaauacucguaagggg

SEQ ID NO: 4531 - RNA, 19 nt, Artificial Sequence
  Synthetic Oligonucleotide
ugagaauaccuguaagggg

SEQ ID NO: 4532 - RNA, 19 nt, Artificial Sequence
  Synthetic Oligonucleotide
ugagaauacuugugagagg

SEQ ID NO: 4533 - RNA, 19 nt, Artificial Sequence
  Synthetic Oligonucleotide
ugagaauacucauaagggg

SEQ ID NO: 4534 - RNA, 19 nt, Artificial Sequence
  Synthetic Oligonucleotide
ugaggauacugguaagagg

SEQ ID NO: 4535 - RNA, 19 nt, Artificial Sequence
  Synthetic Oligonucleotide
ugacaauacuugugagagg

SEQ ID NO: 4536 - RNA, 19 nt, Artificial Sequence
  Synthetic Oligonucleotide
ugagaauacucauaagagg

SEQ ID NO: 4537 - RNA, 19 nt, Artificial Sequence
  Synthetic Oligonucleotide
aggaugaaguggaugaugg

SEQ ID NO: 4538 - RNA, 19 nt, Artificial Sequence
  Synthetic Oligonucleotide
agggugaaauggaugaugg

SEQ ID NO: 4539 - RNA, 19 nt, Artificial Sequence
  Synthetic Oligonucleotide
agaaugaaauggaugaugg

SEQ ID NO: 4540 - RNA, 19 nt, Artificial Sequence
  Synthetic Oligonucleotide
agaaugaaguggaugaugg

SEQ ID NO: 4541 - RNA, 19 nt, Artificial Sequence
  Synthetic Oligonucleotide
ggaugaaguggaugauggc

SEQ ID NO: 4542 - RNA, 19 nt, Artificial Sequence
  Synthetic Oligonucleotide
gggugaaauggaugauggc

SEQ ID NO: 4543 - RNA, 19 nt, Artificial Sequence
  Synthetic Oligonucleotide
gaaugaaauggaugauggc

SEQ ID NO: 4544 - RNA, 19 nt, Artificial Sequence
  Synthetic Oligonucleotide
gaaugaaguggaugauggc

SEQ ID NO: 4545 - RNA, 19 nt, Artificial Sequence
  Synthetic Oligonucleotide
uaggaugaaguggaugaug

SEQ ID NO: 4546 - RNA, 19 nt, Artificial Sequence
  Synthetic Oligonucleotide
uagggugaaauggaugaug

SEQ ID NO: 4547 - RNA, 19 nt, Artificial Sequence
  Synthetic Oligonucleotide
uagaaugaaauggaugaug

SEQ ID NO: 4548 - RNA, 19 nt, Artificial Sequence
  Synthetic Oligonucleotide
caggaugaaauggaugaug

SEQ ID NO: 4549 - RNA, 19 nt, Artificial Sequence
  Synthetic Oligonucleotide
cagaaugaaauggaugaug

SEQ ID NO: 4550 - RNA, 19 nt, Artificial Sequence
  Synthetic Oligonucleotide
cagaaugaaguggaugaug

SEQ ID NO: 4551 - RNA, 19 nt, Artificial Sequence
  Synthetic Oligonucleotide
uuaggaugaaguggaugau

SEQ ID NO: 4552 - RNA, 19 nt, Artificial Sequence
  Synthetic Oligonucleotide
uuagggugaaauggaugau

SEQ ID NO: 4553 - RNA, 19 nt, Artificial Sequence
  Synthetic Oligonucleotide
uuagaaugaaauggaugau

SEQ ID NO: 4554 - RNA, 19 nt, Artificial Sequence
  Synthetic Oligonucleotide
ucaggaugaaauggaugau

SEQ ID NO: 4555 - RNA, 19 nt, Artificial Sequence
  Synthetic Oligonucleotide
ucagaaugaaauggaugau

SEQ ID NO: 4556 - RNA, 19 nt, Artificial Sequence
  Synthetic Oligonucleotide
ucagaaugaaguggaugau

SEQ ID NO: 4557 - RNA, 19 nt, Artificial Sequence
  Synthetic Oligonucleotide
cuuaggaugaaguggauga

SEQ ID NO: 4558 - RNA, 19 nt, Artificial Sequence
  Synthetic Oligonucleotide
cuuagggugaaauggauga

SEQ ID NO: 4559 - RNA, 19 nt, Artificial Sequence
  Synthetic Oligonucleotide
cuuagaaugaaauggauga

SEQ ID NO: 4560 - RNA, 19 nt, Artificial Sequence
  Synthetic Oligonucleotide
cucaggaugaaauggauga

SEQ ID NO: 4561 - RNA, 19 nt, Artificial Sequence
  Synthetic Oligonucleotide
auuaggaugaaauggauga

SEQ ID NO: 4562 - RNA, 19 nt, Artificial Sequence
  Synthetic Oligonucleotide
cucagaaugaaauggauga

SEQ ID NO: 4563 - RNA, 19 nt, Artificial Sequence
  Synthetic Oligonucleotide
cucagaaugaaguggauga

SEQ ID NO: 4564 - RNA, 19 nt, Artificial Sequence
  Synthetic Oligonucleotide
acuuaggaugaaguggaug

SEQ ID NO: 4565 - RNA, 19 nt, Artificial Sequence
  Synthetic Oligonucleotide
acuuagggugaaauggaug

SEQ ID NO: 4566 - RNA, 19 nt, Artificial Sequence
  Synthetic Oligonucleotide
gcuuaggaugaaauggaug

SEQ ID NO: 4567 - RNA, 19 nt, Artificial Sequence
  Synthetic Oligonucleotide
acuuagaaugaaauggaug

SEQ ID NO: 4568 - RNA, 19 nt, Artificial Sequence
  Synthetic Oligonucleotide
acucaggaugaaauggaug

SEQ ID NO: 4569 - RNA, 19 nt, Artificial Sequence
  Synthetic Oligonucleotide
aauuaggaugaaauggaug

SEQ ID NO: 4570 - RNA, 19 nt, Artificial Sequence
  Synthetic Oligonucleotide
ccuuaggaugaaauggaug

SEQ ID NO: 4571 - RNA, 19 nt, Artificial Sequence
  Synthetic Oligonucleotide
ucuuaggaugaaauggaug

SEQ ID NO: 4572 - RNA, 19 nt, Artificial Sequence
  Synthetic Oligonucleotide
ucuuagaaugaaauggaug

SEQ ID NO: 4573 - RNA, 19 nt, Artificial Sequence
  Synthetic Oligonucleotide
acucagaaugaaguggaug

SEQ ID NO: 4574 - RNA, 19 nt, Artificial Sequence
  Synthetic Oligonucleotide
ccucagaaugaaauggaug

SEQ ID NO: 4575 - RNA, 19 nt, Artificial Sequence
  Synthetic Oligonucleotide
ucucagaaugaaauggaug

SEQ ID NO: 4576 - RNA, 19 nt, Artificial Sequence
  Synthetic Oligonucleotide
cacuuaggaugaaguggau

SEQ ID NO: 4577 - RNA, 19 nt, Artificial Sequence
  Synthetic Oligonucleotide
cacuuagggugaaauggau

SEQ ID NO: 4578 - RNA, 19 nt, Artificial Sequence
  Synthetic Oligonucleotide
cgcuuaggaugaaauggau

SEQ ID NO: 4579 - RNA, 19 nt, Artificial Sequence
  Synthetic Oligonucleotide
uacuuaggaugaaauggau

SEQ ID NO: 4580 - RNA, 19 nt, Artificial Sequence
  Synthetic Oligonucleotide
cacuuagaaugaaauggau

SEQ ID NO: 4581 - RNA, 19 nt, Artificial Sequence
  Synthetic Oligonucleotide
cacucaggaugaaauggau

SEQ ID NO: 4582 - RNA, 19 nt, Artificial Sequence
  Synthetic Oligonucleotide
caauuaggaugaaauggau

SEQ ID NO: 4583 - RNA, 19 nt, Artificial Sequence
  Synthetic Oligonucleotide
cccuuaggaugaaauggau

SEQ ID NO: 4584 - RNA, 19 nt, Artificial Sequence
  Synthetic Oligonucleotide
cucuuaggaugaaauggau

SEQ ID NO: 4585 - RNA, 19 nt, Artificial Sequence
  Synthetic Oligonucleotide
cucuuagaaugaaauggau

SEQ ID NO: 4586 - RNA, 19 nt, Artificial Sequence
  Synthetic Oligonucleotide
cacucagaaugaaguggau

SEQ ID NO: 4587 - RNA, 19 nt, Artificial Sequence
  Synthetic Oligonucleotide
cccucagaaugaaauggau

SEQ ID NO: 4588 - RNA, 19 nt, Artificial Sequence
  Synthetic Oligonucleotide
cucucagaaugaaauggau

SEQ ID NO: 4589 - RNA, 19 nt, Artificial Sequence
  Synthetic Oligonucleotide
ucacuuaggaugaagugga

SEQ ID NO: 4590 - RNA, 19 nt, Artificial Sequence
  Synthetic Oligonucleotide
ucacuuagggugaaaugga

SEQ ID NO: 4591 - RNA, 19 nt, Artificial Sequence
  Synthetic Oligonucleotide
ucgcuuaggaugaaaugga

SEQ ID NO: 4592 - RNA, 19 nt, Artificial Sequence
  Synthetic Oligonucleotide
uuacuuaggaugaaaugga

SEQ ID NO: 4593 - RNA, 19 nt, Artificial Sequence
  Synthetic Oligonucleotide
ucacuuagaaugaaaugga

SEQ ID NO: 4594 - RNA, 19 nt, Artificial Sequence
  Synthetic Oligonucleotide
ucacucaggaugaaaugga

SEQ ID NO: 4595 - RNA, 19 nt, Artificial Sequence
  Synthetic Oligonucleotide
ucaauuaggaugaaaugga

SEQ ID NO: 4596 - RNA, 19 nt, Artificial Sequence
  Synthetic Oligonucleotide
ucccuuaggaugaaaugga

SEQ ID NO: 4597 - RNA, 19 nt, Artificial Sequence
  Synthetic Oligonucleotide
ucucuuaggaugaaaugga

SEQ ID NO: 4598 - RNA, 19 nt, Artificial Sequence
  Synthetic Oligonucleotide
gcacuuaggaugaaaugga

SEQ ID NO: 4599 - RNA, 19 nt, Artificial Sequence
  Synthetic Oligonucleotide
gcucuuagaaugaaaugga

SEQ ID NO: 4600 - RNA, 19 nt, Artificial Sequence
  Synthetic Oligonucleotide
cucgcacucgcgagauauu

SEQ ID NO: 4601 - RNA, 19 nt, Artificial Sequence
  Synthetic Oligonucleotide
cucgcacucgugagauacu

SEQ ID NO: 4602 - RNA, 19 nt, Artificial Sequence
  Synthetic Oligonucleotide
cucgcauucgcgagauacu

SEQ ID NO: 4603 - RNA, 19 nt, Artificial Sequence
  Synthetic Oligonucleotide
uucgcacucgcgagauacu

SEQ ID NO: 4604 - RNA, 19 nt, Artificial Sequence
  Synthetic Oligonucleotide
cucgcacucgcgagauagu

SEQ ID NO: 4605 - RNA, 19 nt, Artificial Sequence
  Synthetic Oligonucleotide
cucgcacucgcgagauucu

SEQ ID NO: 4606 - RNA, 19 nt, Artificial Sequence
  Synthetic Oligonucleotide
cucgcacucgcgaaauacu

SEQ ID NO: 4607 - RNA, 19 nt, Artificial Sequence
  Synthetic Oligonucleotide
cucgcacacgcgagauacu

SEQ ID NO: 4608 - RNA, 19 nt, Artificial Sequence
  Synthetic Oligonucleotide
cucgcacccgcgagauacu

SEQ ID NO: 4609 - RNA, 19 nt, Artificial Sequence
  Synthetic Oligonucleotide
cucgaacucgcgagauacu

SEQ ID NO: 4610 - RNA, 19 nt, Artificial Sequence
  Synthetic Oligonucleotide
cccgcacucgcgagauacu

SEQ ID NO: 4611 - RNA, 19 nt, Artificial Sequence
  Synthetic Oligonucleotide
cucgcacucgcggaauacu

SEQ ID NO: 4612 - RNA, 19 nt, Artificial Sequence
  Synthetic Oligonucleotide
uucgcacacgcgagauacu

SEQ ID NO: 4613 - RNA, 19 nt, Artificial Sequence
  Synthetic Oligonucleotide
cucgcacugucgagauacu

SEQ ID NO: 4614 - RNA, 19 nt, Artificial Sequence
  Synthetic Oligonucleotide
cccgcacccgcgagauacu

SEQ ID NO: 4615 - RNA, 19 nt, Artificial Sequence
  Synthetic Oligonucleotide
cccgcacgcgcgagauacu

SEQ ID NO: 4616 - RNA, 19 nt, Artificial Sequence
  Synthetic Oligonucleotide
ucucgcacucgcgagauau

SEQ ID NO: 4617 - RNA, 19 nt, Artificial Sequence
  Synthetic Oligonucleotide
ucucgcacucgugagauac

SEQ ID NO: 4618 - RNA, 19 nt, Artificial Sequence
  Synthetic Oligonucleotide
ucucgcauucgcgagauac

SEQ ID NO: 4619 - RNA, 19 nt, Artificial Sequence
  Synthetic Oligonucleotide
uuucgcacucgcgagauac

SEQ ID NO: 4620 - RNA, 19 nt, Artificial Sequence
  Synthetic Oligonucleotide
ucucgcacucgcgagauag

SEQ ID NO: 4621 - RNA, 19 nt, Artificial Sequence
  Synthetic Oligonucleotide
ucucgcacucgcgagauuc

SEQ ID NO: 4622 - RNA, 19 nt, Artificial Sequence
  Synthetic Oligonucleotide
ucucgcacucgcgaaauac

SEQ ID NO: 4623 - RNA, 19 nt, Artificial Sequence
  Synthetic Oligonucleotide
ucucgcacacgcgagauac

SEQ ID NO: 4624 - RNA, 19 nt, Artificial Sequence
  Synthetic Oligonucleotide
ucucgcacccgcgagauac

SEQ ID NO: 4625 - RNA, 19 nt, Artificial Sequence
  Synthetic Oligonucleotide
ucucgaacucgcgagauac

SEQ ID NO: 4626 - RNA, 19 nt, Artificial Sequence
  Synthetic Oligonucleotide
ucccgcacucgcgagauac

SEQ ID NO: 4627 - RNA, 19 nt, Artificial Sequence
  Synthetic Oligonucleotide
ucucgcacucgcggaauac

SEQ ID NO: 4628 - RNA, 19 nt, Artificial Sequence
  Synthetic Oligonucleotide
uuucgcacacgcgagauac

SEQ ID NO: 4629 - RNA, 19 nt, Artificial Sequence
  Synthetic Oligonucleotide
ucucgcacugucgagauac

SEQ ID NO: 4630 - RNA, 19 nt, Artificial Sequence
  Synthetic Oligonucleotide
ucccgcacccgcgagauac

SEQ ID NO: 4631 - RNA, 19 nt, Artificial Sequence
  Synthetic Oligonucleotide
ucccgcacgcgcgagauac

SEQ ID NO: 4632 - RNA, 19 nt, Artificial Sequence
  Synthetic Oligonucleotide
augaugaugggcauguuua

SEQ ID NO: 4633 - RNA, 19 nt, Artificial Sequence
  Synthetic Oligonucleotide
augaugaugggaauguuca

SEQ ID NO: 4634 - RNA, 19 nt, Artificial Sequence
  Synthetic Oligonucleotide
augaugauggguauguuca

SEQ ID NO: 4635 - RNA, 19 nt, Artificial Sequence
  Synthetic Oligonucleotide
augaugauggguauguuua

SEQ ID NO: 4636 - RNA, 19 nt, Artificial Sequence
  Synthetic Oligonucleotide
ugaugaugggcauguuuaa

SEQ ID NO: 4637 - RNA, 19 nt, Artificial Sequence
  Synthetic Oligonucleotide
ugaugaugggaauguucaa

SEQ ID NO: 4638 - RNA, 19 nt, Artificial Sequence
  Synthetic Oligonucleotide
ugaugauggguauguucaa

SEQ ID NO: 4639 - RNA, 19 nt, Artificial Sequence
  Synthetic Oligonucleotide
ugaugauggguauguuuaa

SEQ ID NO: 4640 - RNA, 19 nt, Artificial Sequence
  Synthetic Oligonucleotide
uuagagccuauguggauag

SEQ ID NO: 4641 - RNA, 19 nt, Artificial Sequence
  Synthetic Oligonucleotide
uuagagccuauguagaugg

SEQ ID NO: 4642 - RNA, 19 nt, Artificial Sequence
  Synthetic Oligonucleotide
uuagagcauauguggaugg

SEQ ID NO: 4643 - RNA, 19 nt, Artificial Sequence
  Synthetic Oligonucleotide
uuagaaccuauguggaugg

SEQ ID NO: 4644 - RNA, 19 nt, Artificial Sequence
  Synthetic Oligonucleotide
uuaaagccuauguggaugg

SEQ ID NO: 4645 - RNA, 19 nt, Artificial Sequence
  Synthetic Oligonucleotide
uuuagagccuauguggaua

SEQ ID NO: 4646 - RNA, 19 nt, Artificial Sequence
  Synthetic Oligonucleotide
uuuagagccuauguagaug

SEQ ID NO: 4647 - RNA, 19 nt, Artificial Sequence
  Synthetic Oligonucleotide
uuuagagcauauguggaug

SEQ ID NO: 4648 - RNA, 19 nt, Artificial Sequence
  Synthetic Oligonucleotide
uuuagaaccuauguggaug

SEQ ID NO: 4649 - RNA, 19 nt, Artificial Sequence
  Synthetic Oligonucleotide
uuuaaagccuauguggaug

SEQ ID NO: 4650 - RNA, 19 nt, Artificial Sequence
  Synthetic Oligonucleotide
uugaggagugccugguuaa

SEQ ID NO: 4651 - RNA, 19 nt, Artificial Sequence
  Synthetic Oligonucleotide
uugaggagugccuaauuaa

SEQ ID NO: 4652 - RNA, 19 nt, Artificial Sequence
  Synthetic Oligonucleotide
uugaggaaugccugauuaa

SEQ ID NO: 4653 - RNA, 19 nt, Artificial Sequence
  Synthetic Oligonucleotide
ucgaggagugccugauuaa

SEQ ID NO: 4654 - RNA, 19 nt, Artificial Sequence
  Synthetic Oligonucleotide
uugaggagugugggauuaa

SEQ ID NO: 4655 - RNA, 19 nt, Artificial Sequence
  Synthetic Oligonucleotide
agagccuauguggaugggu

SEQ ID NO: 4656 - RNA, 19 nt, Artificial Sequence
  Synthetic Oligonucleotide
agagccuauguggauagau

SEQ ID NO: 4657 - RNA, 19 nt, Artificial Sequence
  Synthetic Oligonucleotide
agagccuauguagauggau

SEQ ID NO: 4658 - RNA, 19 nt, Artificial Sequence
  Synthetic Oligonucleotide
agagcauauguggauggau

SEQ ID NO: 4659 - RNA, 19 nt, Artificial Sequence
  Synthetic Oligonucleotide
agaaccuauguggauggau

SEQ ID NO: 4660 - RNA, 19 nt, Artificial Sequence
  Synthetic Oligonucleotide
aaagccuauguggauggau

SEQ ID NO: 4661 - RNA, 19 nt, Artificial Sequence
  Synthetic Oligonucleotide
agagccuauguagaugggu

SEQ ID NO: 4662 - RNA, 19 nt, Artificial Sequence
  Synthetic Oligonucleotide
uagagccuauguggauggg

SEQ ID NO: 4663 - RNA, 19 nt, Artificial Sequence
  Synthetic Oligonucleotide
uagagccuauguggauaga

SEQ ID NO: 4664 - RNA, 19 nt, Artificial Sequence
  Synthetic Oligonucleotide
uagagccuauguagaugga

SEQ ID NO: 4665 - RNA, 19 nt, Artificial Sequence
  Synthetic Oligonucleotide
uagagcauauguggaugga

SEQ ID NO: 4666 - RNA, 19 nt, Artificial Sequence
  Synthetic Oligonucleotide
uagaaccuauguggaugga

SEQ ID NO: 4667 - RNA, 19 nt, Artificial Sequence
  Synthetic Oligonucleotide
uaaagccuauguggaugga

SEQ ID NO: 4668 - RNA, 19 nt, Artificial Sequence
  Synthetic Oligonucleotide
uagagccuauguagauggg

SEQ ID NO: 4669 - RNA, 19 nt, Artificial Sequence
  Synthetic Oligonucleotide
gagccuauguggauggguu

SEQ ID NO: 4670 - RNA, 19 nt, Artificial Sequence
  Synthetic Oligonucleotide
gagccuauguggauggaua

SEQ ID NO: 4671 - RNA, 19 nt, Artificial Sequence
  Synthetic Oligonucleotide
gagccuauguggauagauu

SEQ ID NO: 4672 - RNA, 19 nt, Artificial Sequence
  Synthetic Oligonucleotide
gagccuauguagauggauu

SEQ ID NO: 4673 - RNA, 19 nt, Artificial Sequence
  Synthetic Oligonucleotide
gagcauauguggauggauu

SEQ ID NO: 4674 - RNA, 19 nt, Artificial Sequence
  Synthetic Oligonucleotide
gaaccuauguggauggauu

SEQ ID NO: 4675 - RNA, 19 nt, Artificial Sequence
  Synthetic Oligonucleotide
aagccuauguggauggauu

SEQ ID NO: 4676 - RNA, 19 nt, Artificial Sequence
  Synthetic Oligonucleotide
gagccuauguagauggguu

SEQ ID NO: 4677 - RNA, 19 nt, Artificial Sequence
  Synthetic Oligonucleotide
auugaggagugccugguua

SEQ ID NO: 4678 - RNA, 19 nt, Artificial Sequence
  Synthetic Oligonucleotide
guugaggagugccugauua

SEQ ID NO: 4679 - RNA, 19 nt, Artificial Sequence
  Synthetic Oligonucleotide
auugaggagugccuaauua

SEQ ID NO: 4680 - RNA, 19 nt, Artificial Sequence
  Synthetic Oligonucleotide
auugaggaaugccugauua

SEQ ID NO: 4681 - RNA, 19 nt, Artificial Sequence
  Synthetic Oligonucleotide
aucgaggagugccugauua

SEQ ID NO: 4682 - RNA, 19 nt, Artificial Sequence
  Synthetic Oligonucleotide
guugaggagugccuaauua

SEQ ID NO: 4683 - RNA, 19 nt, Artificial Sequence
  Synthetic Oligonucleotide
guugaggaaugccugauua

SEQ ID NO: 4684 - RNA, 19 nt, Artificial Sequence
  Synthetic Oligonucleotide
auugaggagugugggauua

SEQ ID NO: 4685 - RNA, 19 nt, Artificial Sequence
  Synthetic Oligonucleotide
gcaauugaggagugccugg

SEQ ID NO: 4686 - RNA, 19 nt, Artificial Sequence
  Synthetic Oligonucleotide
gcaguugaggagugccuga

SEQ ID NO: 4687 - RNA, 19 nt, Artificial Sequence
  Synthetic Oligonucleotide
gcgauugaggagugccuga

SEQ ID NO: 4688 - RNA, 19 nt, Artificial Sequence
  Synthetic Oligonucleotide
gcaauugaggagugccuaa

SEQ ID NO: 4689 - RNA, 19 nt, Artificial Sequence
  Synthetic Oligonucleotide
gcaauugaggaaugccuga

SEQ ID NO: 4690 - RNA, 19 nt, Artificial Sequence
  Synthetic Oligonucleotide
gcaaucgaggagugccuga

SEQ ID NO: 4691 - RNA, 19 nt, Artificial Sequence
  Synthetic Oligonucleotide
gcaguugaggagugccuaa

SEQ ID NO: 4692 - RNA, 19 nt, Artificial Sequence
  Synthetic Oligonucleotide
gcaguugaggaaugccuga

SEQ ID NO: 4693 - RNA, 19 nt, Artificial Sequence
  Synthetic Oligonucleotide
gcaauugaggaguguggga

SEQ ID NO: 4694 - RNA, 19 nt, Artificial Sequence
  Synthetic Oligonucleotide
agcaguugaggagugccug

SEQ ID NO: 4695 - RNA, 19 nt, Artificial Sequence
  Synthetic Oligonucleotide
agcgauugaggagugccug

SEQ ID NO: 4696 - RNA, 19 nt, Artificial Sequence
  Synthetic Oligonucleotide
ggcaauugaggagugccug

SEQ ID NO: 4697 - RNA, 19 nt, Artificial Sequence
  Synthetic Oligonucleotide
agcaauugaggagugccua

SEQ ID NO: 4698 - RNA, 19 nt, Artificial Sequence
  Synthetic Oligonucleotide
agcaauugaggaaugccug

SEQ ID NO: 4699 - RNA, 19 nt, Artificial Sequence
  Synthetic Oligonucleotide
agcaaucgaggagugccug

SEQ ID NO: 4700 - RNA, 19 nt, Artificial Sequence
  Synthetic Oligonucleotide
agcaguugaggagugccua

SEQ ID NO: 4701 - RNA, 19 nt, Artificial Sequence
  Synthetic Oligonucleotide
agcaguugaggaaugccug

SEQ ID NO: 4702 - RNA, 19 nt, Artificial Sequence
  Synthetic Oligonucleotide
ugcaauugaggagugccua

SEQ ID NO: 4703 - RNA, 19 nt, Artificial Sequence
  Synthetic Oligonucleotide
caauugaggagugccuggu

SEQ ID NO: 4704 - RNA, 19 nt, Artificial Sequence
  Synthetic Oligonucleotide
caguugaggagugccugau

SEQ ID NO: 4705 - RNA, 19 nt, Artificial Sequence
  Synthetic Oligonucleotide
cgauugaggagugccugau

SEQ ID NO: 4706 - RNA, 19 nt, Artificial Sequence
  Synthetic Oligonucleotide
caauugaggagugccuaau

SEQ ID NO: 4707 - RNA, 19 nt, Artificial Sequence
  Synthetic Oligonucleotide
caauugaggaaugccugau

SEQ ID NO: 4708 - RNA, 19 nt, Artificial Sequence
  Synthetic Oligonucleotide
caaucgaggagugccugau

SEQ ID NO: 4709 - RNA, 19 nt, Artificial Sequence
  Synthetic Oligonucleotide
caguugaggagugccuaau

SEQ ID NO: 4710 - RNA, 19 nt, Artificial Sequence
  Synthetic Oligonucleotide
caguugaggaaugccugau

SEQ ID NO: 4711 - RNA, 19 nt, Artificial Sequence
  Synthetic Oligonucleotide
caauugaggagugugggau

SEQ ID NO: 4712 - RNA, 19 nt, Artificial Sequence
  Synthetic Oligonucleotide
aauugaggagugccugguu

SEQ ID NO: 4713 - RNA, 19 nt, Artificial Sequence
  Synthetic Oligonucleotide
aguugaggagugccugauu

SEQ ID NO: 4714 - RNA, 19 nt, Artificial Sequence
  Synthetic Oligonucleotide
gauugaggagugccugauu

SEQ ID NO: 4715 - RNA, 19 nt, Artificial Sequence
  Synthetic Oligonucleotide
aauugaggagugccuaauu

SEQ ID NO: 4716 - RNA, 19 nt, Artificial Sequence
  Synthetic Oligonucleotide
aauugaggaaugccugauu

SEQ ID NO: 4717 - RNA, 19 nt, Artificial Sequence
  Synthetic Oligonucleotide
aaucgaggagugccugauu

SEQ ID NO: 4718 - RNA, 19 nt, Artificial Sequence
  Synthetic Oligonucleotide
aguugaggagugccuaauu

SEQ ID NO: 4719 - RNA, 19 nt, Artificial Sequence
  Synthetic Oligonucleotide
aguugaggaaugccugauu

SEQ ID NO: 4720 - RNA, 19 nt, Artificial Sequence
  Synthetic Oligonucleotide
aauugaggagugugggauu

SEQ ID NO: 4721 - RNA, 19 nt, Artificial Sequence
  Synthetic Oligonucleotide
uauaugaagcaguugagga

SEQ ID NO: 4722 - RNA, 19 nt, Artificial Sequence
  Synthetic Oligonucleotide
uauaugaagcgauugagga

SEQ ID NO: 4723 - RNA, 19 nt, Artificial Sequence
  Synthetic Oligonucleotide
uauaugaggcaauugagga

SEQ ID NO: 4724 - RNA, 19 nt, Artificial Sequence
  Synthetic Oligonucleotide
uauauggagcaauugagga

SEQ ID NO: 4725 - RNA, 19 nt, Artificial Sequence
  Synthetic Oligonucleotide
uguaugaagcaauugagga

SEQ ID NO: 4726 - RNA, 19 nt, Artificial Sequence
  Synthetic Oligonucleotide
uauaugaagcaaucgagga

SEQ ID NO: 4727 - RNA, 19 nt, Artificial Sequence
  Synthetic Oligonucleotide
uauaugaugcaauugagga

SEQ ID NO: 4728 - RNA, 19 nt, Artificial Sequence
  Synthetic Oligonucleotide
uauacgaagcaauugagga

SEQ ID NO: 4729 - RNA, 19 nt, Artificial Sequence
  Synthetic Oligonucleotide
cuauaugaagcaguugagg

SEQ ID NO: 4730 - RNA, 19 nt, Artificial Sequence
  Synthetic Oligonucleotide
cuauaugaagcgauugagg

SEQ ID NO: 4731 - RNA, 19 nt, Artificial Sequence
  Synthetic Oligonucleotide
cuauaugaggcaauugagg

SEQ ID NO: 4732 - RNA, 19 nt, Artificial Sequence
  Synthetic Oligonucleotide
cuauauggagcaauugagg

SEQ ID NO: 4733 - RNA, 19 nt, Artificial Sequence
  Synthetic Oligonucleotide
cuguaugaagcaauugagg

SEQ ID NO: 4734 - RNA, 19 nt, Artificial Sequence
  Synthetic Oligonucleotide
uuauaugaagcaauugagg

SEQ ID NO: 4735 - RNA, 19 nt, Artificial Sequence
  Synthetic Oligonucleotide
cuauaugaagcaaucgagg

SEQ ID NO: 4736 - RNA, 19 nt, Artificial Sequence
  Synthetic Oligonucleotide
cuauaugaugcaauugagg

SEQ ID NO: 4737 - RNA, 19 nt, Artificial Sequence
  Synthetic Oligonucleotide
cuauacgaagcaauugagg

SEQ ID NO: 4738 - RNA, 19 nt, Artificial Sequence
  Synthetic Oligonucleotide
gaagcaguugaggagugcc

SEQ ID NO: 4739 - RNA, 19 nt, Artificial Sequence
  Synthetic Oligonucleotide
gaagcgauugaggagugcc

SEQ ID NO: 4740 - RNA, 19 nt, Artificial Sequence
  Synthetic Oligonucleotide
gaggcaauugaggagugcc

SEQ ID NO: 4741 - RNA, 19 nt, Artificial Sequence
  Synthetic Oligonucleotide
ggagcaauugaggagugcc

SEQ ID NO: 4742 - RNA, 19 nt, Artificial Sequence
  Synthetic Oligonucleotide
gaagcaauugaggaaugcc

SEQ ID NO: 4743 - RNA, 19 nt, Artificial Sequence
  Synthetic Oligonucleotide
gaagcaaucgaggagugcc

SEQ ID NO: 4744 - RNA, 19 nt, Artificial Sequence
  Synthetic Oligonucleotide
gaugcaauugaggagugcc

SEQ ID NO: 4745 - RNA, 19 nt, Artificial Sequence
  Synthetic Oligonucleotide
gaagcaguugaggaaugcc

SEQ ID NO: 4746 - RNA, 19 nt, Artificial Sequence
  Synthetic Oligonucleotide
gaugcaauugaggagugug

SEQ ID NO: 4747 - RNA, 19 nt, Artificial Sequence
  Synthetic Oligonucleotide
aagcaguugaggagugccu

SEQ ID NO: 4748 - RNA, 19 nt, Artificial Sequence
  Synthetic Oligonucleotide
aagcgauugaggagugccu

SEQ ID NO: 4749 - RNA, 19 nt, Artificial Sequence
  Synthetic Oligonucleotide
aggcaauugaggagugccu

SEQ ID NO: 4750 - RNA, 19 nt, Artificial Sequence
  Synthetic Oligonucleotide
gagcaauugaggagugccu

SEQ ID NO: 4751 - RNA, 19 nt, Artificial Sequence
  Synthetic Oligonucleotide
aagcaauugaggaaugccu

SEQ ID NO: 4752 - RNA, 19 nt, Artificial Sequence
  Synthetic Oligonucleotide
aagcaaucgaggagugccu

SEQ ID NO: 4753 - RNA, 19 nt, Artificial Sequence
  Synthetic Oligonucleotide
augcaauugaggagugccu

SEQ ID NO: 4754 - RNA, 19 nt, Artificial Sequence
  Synthetic Oligonucleotide
aagcaguugaggaaugccu

SEQ ID NO: 4755 - RNA, 19 nt, Artificial Sequence
  Synthetic Oligonucleotide
uaugaagcaguugaggagu

SEQ ID NO: 4756 - RNA, 19 nt, Artificial Sequence
  Synthetic Oligonucleotide
uaugaagcgauugaggagu

SEQ ID NO: 4757 - RNA, 19 nt, Artificial Sequence
  Synthetic Oligonucleotide
uaugaggcaauugaggagu

SEQ ID NO: 4758 - RNA, 19 nt, Artificial Sequence
  Synthetic Oligonucleotide
uauggagcaauugaggagu

SEQ ID NO: 4759 - RNA, 19 nt, Artificial Sequence
  Synthetic Oligonucleotide
uaugaagcaauugaggaau

SEQ ID NO: 4760 - RNA, 19 nt, Artificial Sequence
  Synthetic Oligonucleotide
uaugaagcaaucgaggagu

SEQ ID NO: 4761 - RNA, 19 nt, Artificial Sequence
  Synthetic Oligonucleotide
uaugaugcaauugaggagu

SEQ ID NO: 4762 - RNA, 19 nt, Artificial Sequence
  Synthetic Oligonucleotide
uacgaagcaauugaggagu

SEQ ID NO: 4763 - RNA, 19 nt, Artificial Sequence
  Synthetic Oligonucleotide
uaugaagcaguugaggaau

SEQ ID NO: 4764 - RNA, 19 nt, Artificial Sequence
  Synthetic Oligonucleotide
augaagcaguugaggagug

SEQ ID NO: 4765 - RNA, 19 nt, Artificial Sequence
  Synthetic Oligonucleotide
augaagcgauugaggagug

SEQ ID NO: 4766 - RNA, 19 nt, Artificial Sequence
  Synthetic Oligonucleotide
augaggcaauugaggagug

SEQ ID NO: 4767 - RNA, 19 nt, Artificial Sequence
  Synthetic Oligonucleotide
auggagcaauugaggagug

SEQ ID NO: 4768 - RNA, 19 nt, Artificial Sequence
  Synthetic Oligonucleotide
augaagcaauugaggaaug

SEQ ID NO: 4769 - RNA, 19 nt, Artificial Sequence
  Synthetic Oligonucleotide
augaagcaaucgaggagug

SEQ ID NO: 4770 - RNA, 19 nt, Artificial Sequence
  Synthetic Oligonucleotide
augaugcaauugaggagug

SEQ ID NO: 4771 - RNA, 19 nt, Artificial Sequence
  Synthetic Oligonucleotide
acgaagcaauugaggagug

SEQ ID NO: 4772 - RNA, 19 nt, Artificial Sequence
  Synthetic Oligonucleotide
augaagcaguugaggaaug

SEQ ID NO: 4773 - RNA, 19 nt, Artificial Sequence
  Synthetic Oligonucleotide
ugaagcaguugaggagugc

SEQ ID NO: 4774 - RNA, 19 nt, Artificial Sequence
  Synthetic Oligonucleotide
ugaagcgauugaggagugc

SEQ ID NO: 4775 - RNA, 19 nt, Artificial Sequence
  Synthetic Oligonucleotide
ugaggcaauugaggagugc

SEQ ID NO: 4776 - RNA, 19 nt, Artificial Sequence
  Synthetic Oligonucleotide
uggagcaauugaggagugc

SEQ ID NO: 4777 - RNA, 19 nt, Artificial Sequence
  Synthetic Oligonucleotide
ugaagcaauugaggaaugc

SEQ ID NO: 4778 - RNA, 19 nt, Artificial Sequence
  Synthetic Oligonucleotide
ugaagcaaucgaggagugc

SEQ ID NO: 4779 - RNA, 19 nt, Artificial Sequence
  Synthetic Oligonucleotide
ugaugcaauugaggagugc

SEQ ID NO: 4780 - RNA, 19 nt, Artificial Sequence
  Synthetic Oligonucleotide
cgaagcaauugaggagugc

SEQ ID NO: 4781 - RNA, 19 nt, Artificial Sequence
  Synthetic Oligonucleotide
ugaagcaguugaggaaugc

SEQ ID NO: 4782 - RNA, 19 nt, Artificial Sequence
  Synthetic Oligonucleotide
ugaugcaauugaggagugu

SEQ ID NO: 4783 - RNA, 19 nt, Artificial Sequence
  Synthetic Oligonucleotide
auaugaagcaguugaggag

SEQ ID NO: 4784 - RNA, 19 nt, Artificial Sequence
  Synthetic Oligonucleotide
auaugaagcgauugaggag

SEQ ID NO: 4785 - RNA, 19 nt, Artificial Sequence
  Synthetic Oligonucleotide
auaugaggcaauugaggag

SEQ ID NO: 4786 - RNA, 19 nt, Artificial Sequence
  Synthetic Oligonucleotide
auauggagcaauugaggag

SEQ ID NO: 4787 - RNA, 19 nt, Artificial Sequence
  Synthetic Oligonucleotide
guaugaagcaauugaggag

SEQ ID NO: 4788 - RNA, 19 nt, Artificial Sequence
  Synthetic Oligonucleotide
auaugaagcaauugaggaa

SEQ ID NO: 4789 - RNA, 19 nt, Artificial Sequence
  Synthetic Oligonucleotide
auaugaagcaaucgaggag

SEQ ID NO: 4790 - RNA, 19 nt, Artificial Sequence
  Synthetic Oligonucleotide
auaugaugcaauugaggag

SEQ ID NO: 4791 - RNA, 19 nt, Artificial Sequence
  Synthetic Oligonucleotide
auacgaagcaauugaggag

SEQ ID NO: 4792 - RNA, 19 nt, Artificial Sequence
  Synthetic Oligonucleotide
auaugaagcaguugaggaa

SEQ ID NO: 4793 - RNA, 19 nt, Artificial Sequence
  Synthetic Oligonucleotide
gggcuauaugaagcaguug

SEQ ID NO: 4794 - RNA, 19 nt, Artificial Sequence
  Synthetic Oligonucleotide
gggcuauaugaagcgauug

SEQ ID NO: 4795 - RNA, 19 nt, Artificial Sequence
  Synthetic Oligonucleotide
gggcuauaugaggcaauug

SEQ ID NO: 4796 - RNA, 19 nt, Artificial Sequence
  Synthetic Oligonucleotide
gggcuauauggagcaauug

SEQ ID NO: 4797 - RNA, 19 nt, Artificial Sequence
  Synthetic Oligonucleotide
gggcuguaugaagcaauug

SEQ ID NO: 4798 - RNA, 19 nt, Artificial Sequence
  Synthetic Oligonucleotide
ggguuauaugaagcaauug

SEQ ID NO: 4799 - RNA, 19 nt, Artificial Sequence
  Synthetic Oligonucleotide
gggcuauaugaagcaaucg

SEQ ID NO: 4800 - RNA, 19 nt, Artificial Sequence
  Synthetic Oligonucleotide
gggcuauaugaugcaauug

SEQ ID NO: 4801 - RNA, 19 nt, Artificial Sequence
  Synthetic Oligonucleotide
gggcuauacgaagcaauug

SEQ ID NO: 4802 - RNA, 19 nt, Artificial Sequence
  Synthetic Oligonucleotide
ggacuauaugaagcaauug

SEQ ID NO: 4803 - RNA, 19 nt, Artificial Sequence
  Synthetic Oligonucleotide
ggauuauaugaagcaauug

SEQ ID NO: 4804 - RNA, 19 nt, Artificial Sequence
  Synthetic Oligonucleotide
gcuauaugaagcaguugag

SEQ ID NO: 4805 - RNA, 19 nt, Artificial Sequence
  Synthetic Oligonucleotide
gcuauaugaagcgauugag

SEQ ID NO: 4806 - RNA, 19 nt, Artificial Sequence
  Synthetic Oligonucleotide
gcuauaugaggcaauugag

SEQ ID NO: 4807 - RNA, 19 nt, Artificial Sequence
  Synthetic Oligonucleotide
gcuauauggagcaauugag

SEQ ID NO: 4808 - RNA, 19 nt, Artificial Sequence
  Synthetic Oligonucleotide
gcuguaugaagcaauugag

SEQ ID NO: 4809 - RNA, 19 nt, Artificial Sequence
  Synthetic Oligonucleotide
guuauaugaagcaauugag

SEQ ID NO: 4810 - RNA, 19 nt, Artificial Sequence
  Synthetic Oligonucleotide
gcuauaugaagcaaucgag

SEQ ID NO: 4811 - RNA, 19 nt, Artificial Sequence
  Synthetic Oligonucleotide
gcuauaugaugcaauugag

SEQ ID NO: 4812 - RNA, 19 nt, Artificial Sequence
  Synthetic Oligonucleotide
gcuauacgaagcaauugag

SEQ ID NO: 4813 - RNA, 19 nt, Artificial Sequence
  Synthetic Oligonucleotide
acuauaugaagcaauugag

SEQ ID NO: 4814 - RNA, 19 nt, Artificial Sequence
  Synthetic Oligonucleotide
auuauaugaagcaauugag

SEQ ID NO: 4815 - RNA, 19 nt, Artificial Sequence
  Synthetic Oligonucleotide
ggcuauaugaagcaguuga

SEQ ID NO: 4816 - RNA, 19 nt, Artificial Sequence
  Synthetic Oligonucleotide
ggcuauaugaagcgauuga

SEQ ID NO: 4817 - RNA, 19 nt, Artificial Sequence
  Synthetic Oligonucleotide
ggcuauaugaggcaauuga

SEQ ID NO: 4818 - RNA, 19 nt, Artificial Sequence
  Synthetic Oligonucleotide
ggcuauauggagcaauuga

SEQ ID NO: 4819 - RNA, 19 nt, Artificial Sequence
  Synthetic Oligonucleotide
ggcuguaugaagcaauuga

SEQ ID NO: 4820 - RNA, 19 nt, Artificial Sequence
  Synthetic Oligonucleotide
gguuauaugaagcaauuga

SEQ ID NO: 4821 - RNA, 19 nt, Artificial Sequence
  Synthetic Oligonucleotide
ggcuauaugaagcaaucga

SEQ ID NO: 4822 - RNA, 19 nt, Artificial Sequence
  Synthetic Oligonucleotide
ggcuauaugaugcaauuga

SEQ ID NO: 4823 - RNA, 19 nt, Artificial Sequence
  Synthetic Oligonucleotide
ggcuauacgaagcaauuga

SEQ ID NO: 4824 - RNA, 19 nt, Artificial Sequence
  Synthetic Oligonucleotide
gacuauaugaagcaauuga

SEQ ID NO: 4825 - RNA, 19 nt, Artificial Sequence
  Synthetic Oligonucleotide
gauuauaugaagcaauuga

SEQ ID NO: 4826 - RNA, 19 nt, Artificial Sequence
  Synthetic Oligonucleotide
ggcaagcuuucucagaugu

SEQ ID NO: 4827 - RNA, 19 nt, Artificial Sequence
  Synthetic Oligonucleotide
gguaagcuuucucaaaugu

SEQ ID NO: 4828 - RNA, 19 nt, Artificial Sequence
  Synthetic Oligonucleotide
ggcaagcuuucacaaaugu

SEQ ID NO: 4829 - RNA, 19 nt, Artificial Sequence
  Synthetic Oligonucleotide
ggcaagcuuccucaaaugu

SEQ ID NO: 4830 - RNA, 19 nt, Artificial Sequence
  Synthetic Oligonucleotide
ggcaagcugucucaaaugu

SEQ ID NO: 4831 - RNA, 19 nt, Artificial Sequence
  Synthetic Oligonucleotide
ggcaaacuuucucaaaugu

SEQ ID NO: 4832 - RNA, 19 nt, Artificial Sequence
  Synthetic Oligonucleotide
gguaagcuuucacaaaugu

SEQ ID NO: 4833 - RNA, 19 nt, Artificial Sequence
  Synthetic Oligonucleotide
gcaagcuuucucaaauguu

SEQ ID NO: 4834 - RNA, 19 nt, Artificial Sequence
  Synthetic Oligonucleotide
gcaagcuuucucagauguc

SEQ ID NO: 4835 - RNA, 19 nt, Artificial Sequence
  Synthetic Oligonucleotide
guaagcuuucucaaauguc

SEQ ID NO: 4836 - RNA, 19 nt, Artificial Sequence
  Synthetic Oligonucleotide
gcaagcuuucucaaaugua

SEQ ID NO: 4837 - RNA, 19 nt, Artificial Sequence
  Synthetic Oligonucleotide
gcaagcuuucacaaauguc

SEQ ID NO: 4838 - RNA, 19 nt, Artificial Sequence
  Synthetic Oligonucleotide
gcaagcuuccucaaauguc

SEQ ID NO: 4839 - RNA, 19 nt, Artificial Sequence
  Synthetic Oligonucleotide
gcaagcugucucaaauguc

SEQ ID NO: 4840 - RNA, 19 nt, Artificial Sequence
  Synthetic Oligonucleotide
gcaaacuuucucaaauguc

SEQ ID NO: 4841 - RNA, 19 nt, Artificial Sequence
  Synthetic Oligonucleotide
guaagcuuucacaaauguc

SEQ ID NO: 4842 - RNA, 19 nt, Artificial Sequence
  Synthetic Oligonucleotide
uugaggguaagcuuucuca

SEQ ID NO: 4843 - RNA, 19 nt, Artificial Sequence
  Synthetic Oligonucleotide
uugagggcaagcuuucaca

SEQ ID NO: 4844 - RNA, 19 nt, Artificial Sequence
  Synthetic Oligonucleotide
uugagggcaagcuuccuca

SEQ ID NO: 4845 - RNA, 19 nt, Artificial Sequence
  Synthetic Oligonucleotide
uugagggcaagcugucuca

SEQ ID NO: 4846 - RNA, 19 nt, Artificial Sequence
  Synthetic Oligonucleotide
uugagggcaaacuuucuca

SEQ ID NO: 4847 - RNA, 19 nt, Artificial Sequence
  Synthetic Oligonucleotide
uugaaggcaagcuuucuca

SEQ ID NO: 4848 - RNA, 19 nt, Artificial Sequence
  Synthetic Oligonucleotide
uagagggcaagcuuucuca

SEQ ID NO: 4849 - RNA, 19 nt, Artificial Sequence
  Synthetic Oligonucleotide
uugaggguaagcuuucaca

SEQ ID NO: 4850 - RNA, 19 nt, Artificial Sequence
  Synthetic Oligonucleotide
auugaggguaagcuuucuc

SEQ ID NO: 4851 - RNA, 19 nt, Artificial Sequence
  Synthetic Oligonucleotide
auugagggcaagcuuucac

SEQ ID NO: 4852 - RNA, 19 nt, Artificial Sequence
  Synthetic Oligonucleotide
auugagggcaagcuuccuc

SEQ ID NO: 4853 - RNA, 19 nt, Artificial Sequence
  Synthetic Oligonucleotide
auugagggcaagcugucuc

SEQ ID NO: 4854 - RNA, 19 nt, Artificial Sequence
  Synthetic Oligonucleotide
auugagggcaaacuuucuc

SEQ ID NO: 4855 - RNA, 19 nt, Artificial Sequence
  Synthetic Oligonucleotide
auugaaggcaagcuuucuc

SEQ ID NO: 4856 - RNA, 19 nt, Artificial Sequence
  Synthetic Oligonucleotide
auagagggcaagcuuucuc

SEQ ID NO: 4857 - RNA, 19 nt, Artificial Sequence
  Synthetic Oligonucleotide
auugaggguaagcuuucac

SEQ ID NO: 4858 - RNA, 19 nt, Artificial Sequence
  Synthetic Oligonucleotide
cauugaggguaagcuuucu

SEQ ID NO: 4859 - RNA, 19 nt, Artificial Sequence
  Synthetic Oligonucleotide
cauugagggcaagcuuuca

SEQ ID NO: 4860 - RNA, 19 nt, Artificial Sequence
  Synthetic Oligonucleotide
cauugagggcaagcuuccu

SEQ ID NO: 4861 - RNA, 19 nt, Artificial Sequence
  Synthetic Oligonucleotide
cauugagggcaagcugucu

SEQ ID NO: 4862 - RNA, 19 nt, Artificial Sequence
  Synthetic Oligonucleotide
cauugagggcaaacuuucu

SEQ ID NO: 4863 - RNA, 19 nt, Artificial Sequence
  Synthetic Oligonucleotide
cauugaaggcaagcuuucu

SEQ ID NO: 4864 - RNA, 19 nt, Artificial Sequence
  Synthetic Oligonucleotide
cauagagggcaagcuuucu

SEQ ID NO: 4865 - RNA, 19 nt, Artificial Sequence
  Synthetic Oligonucleotide
cauugaggguaagcuuuca

SEQ ID NO: 4866 - RNA, 19 nt, Artificial Sequence
  Synthetic Oligonucleotide
gggcaagcuuucucagaug

SEQ ID NO: 4867 - RNA, 19 nt, Artificial Sequence
  Synthetic Oligonucleotide
ggguaagcuuucucaaaug

SEQ ID NO: 4868 - RNA, 19 nt, Artificial Sequence
  Synthetic Oligonucleotide
gggcaagcuuucacaaaug

SEQ ID NO: 4869 - RNA, 19 nt, Artificial Sequence
  Synthetic Oligonucleotide
gggcaagcuuccucaaaug

SEQ ID NO: 4870 - RNA, 19 nt, Artificial Sequence
  Synthetic Oligonucleotide
gggcaagcugucucaaaug

SEQ ID NO: 4871 - RNA, 19 nt, Artificial Sequence
  Synthetic Oligonucleotide
gggcaaacuuucucaaaug

SEQ ID NO: 4872 - RNA, 19 nt, Artificial Sequence
  Synthetic Oligonucleotide
aggcaagcuuucucaaaug

SEQ ID NO: 4873 - RNA, 19 nt, Artificial Sequence
  Synthetic Oligonucleotide
ggguaagcuuucacaaaug

SEQ ID NO: 4874 - RNA, 19 nt, Artificial Sequence
  Synthetic Oligonucleotide
agggcaagcuuucucagau

SEQ ID NO: 4875 - RNA, 19 nt, Artificial Sequence
  Synthetic Oligonucleotide
aggguaagcuuucucaaau

SEQ ID NO: 4876 - RNA, 19 nt, Artificial Sequence
  Synthetic Oligonucleotide
agggcaagcuuucacaaau

SEQ ID NO: 4877 - RNA, 19 nt, Artificial Sequence
  Synthetic Oligonucleotide
agggcaagcuuccucaaau

SEQ ID NO: 4878 - RNA, 19 nt, Artificial Sequence
  Synthetic Oligonucleotide
agggcaagcugucucaaau

SEQ ID NO: 4879 - RNA, 19 nt, Artificial Sequence
  Synthetic Oligonucleotide
agggcaaacuuucucaaau

SEQ ID NO: 4880 - RNA, 19 nt, Artificial Sequence
  Synthetic Oligonucleotide
aaggcaagcuuucucaaau

SEQ ID NO: 4881 - RNA, 19 nt, Artificial Sequence
  Synthetic Oligonucleotide
aggguaagcuuucacaaau

SEQ ID NO: 4882 - RNA, 19 nt, Artificial Sequence
  Synthetic Oligonucleotide
gagggcaagcuuucucaga

SEQ ID NO: 4883 - RNA, 19 nt, Artificial Sequence
  Synthetic Oligonucleotide
gaggguaagcuuucucaaa

SEQ ID NO: 4884 - RNA, 19 nt, Artificial Sequence
  Synthetic Oligonucleotide
gagggcaagcuuucacaaa

SEQ ID NO: 4885 - RNA, 19 nt, Artificial Sequence
  Synthetic Oligonucleotide
gagggcaagcuuccucaaa

SEQ ID NO: 4886 - RNA, 19 nt, Artificial Sequence
  Synthetic Oligonucleotide
gagggcaagcugucucaaa

SEQ ID NO: 4887 - RNA, 19 nt, Artificial Sequence
  Synthetic Oligonucleotide
gagggcaaacuuucucaaa

SEQ ID NO: 4888 - RNA, 19 nt, Artificial Sequence
  Synthetic Oligonucleotide
gaaggcaagcuuucucaaa

SEQ ID NO: 4889 - RNA, 19 nt, Artificial Sequence
  Synthetic Oligonucleotide
gaggguaagcuuucacaaa

SEQ ID NO: 4890 - RNA, 19 nt, Artificial Sequence
  Synthetic Oligonucleotide
ugagggcaagcuuucucag

SEQ ID NO: 4891 - RNA, 19 nt, Artificial Sequence
  Synthetic Oligonucleotide
ugaggguaagcuuucucaa

SEQ ID NO: 4892 - RNA, 19 nt, Artificial Sequence
  Synthetic Oligonucleotide
ugagggcaagcuuucacaa

SEQ ID NO: 4893 - RNA, 19 nt, Artificial Sequence
  Synthetic Oligonucleotide
ugagggcaagcuuccucaa

SEQ ID NO: 4894 - RNA, 19 nt, Artificial Sequence
  Synthetic Oligonucleotide
ugagggcaagcugucucaa

SEQ ID NO: 4895 - RNA, 19 nt, Artificial Sequence
  Synthetic Oligonucleotide
ugagggcaaacuuucucaa

SEQ ID NO: 4896 - RNA, 19 nt, Artificial Sequence
  Synthetic Oligonucleotide
ugaaggcaagcuuucucaa

SEQ ID NO: 4897 - RNA, 19 nt, Artificial Sequence
  Synthetic Oligonucleotide
agagggcaagcuuucucaa

SEQ ID NO: 4898 - RNA, 19 nt, Artificial Sequence
  Synthetic Oligonucleotide
ugaggguaagcuuucacaa

SEQ ID NO: 4899 - RNA, 19 nt, Artificial Sequence
  Synthetic Oligonucleotide
uuugugcgacaaugcuuua

SEQ ID NO: 4900 - RNA, 19 nt, Artificial Sequence
  Synthetic Oligonucleotide
uuugugcgacaauguuuca

SEQ ID NO: 4901 - RNA, 19 nt, Artificial Sequence
  Synthetic Oligonucleotide
uuugugcgacagugcuuca

SEQ ID NO: 4902 - RNA, 19 nt, Artificial Sequence
  Synthetic Oligonucleotide
uuugugcggcaaugcuuca

SEQ ID NO: 4903 - RNA, 19 nt, Artificial Sequence
  Synthetic Oligonucleotide
uuugugcgacaaugcuucu

SEQ ID NO: 4904 - RNA, 19 nt, Artificial Sequence
  Synthetic Oligonucleotide
uuugugagacaaugcuuca

SEQ ID NO: 4905 - RNA, 19 nt, Artificial Sequence
  Synthetic Oligonucleotide
uuugugggacaaugcuuca

SEQ ID NO: 4906 - RNA, 19 nt, Artificial Sequence
  Synthetic Oligonucleotide
uucgugcgacaaugcuuca

SEQ ID NO: 4907 - RNA, 19 nt, Artificial Sequence
  Synthetic Oligonucleotide
ugugugcgacaaugcuuca

SEQ ID NO: 4908 - RNA, 19 nt, Artificial Sequence
  Synthetic Oligonucleotide
cuugugcgacaaugcuuca

SEQ ID NO: 4909 - RNA, 19 nt, Artificial Sequence
  Synthetic Oligonucleotide
uuugugcgacgcugcuuca

SEQ ID NO: 4910 - RNA, 19 nt, Artificial Sequence
  Synthetic Oligonucleotide
uuuguacgacaaugcuuua

SEQ ID NO: 4911 - RNA, 19 nt, Artificial Sequence
  Synthetic Oligonucleotide
uuuguacggcaaugcuuca

SEQ ID NO: 4912 - RNA, 19 nt, Artificial Sequence
  Synthetic Oligonucleotide
uuugagggacaaugguuca

SEQ ID NO: 4913 - RNA, 19 nt, Artificial Sequence
  Synthetic Oligonucleotide
uugugcgacaaugcuuuaa

SEQ ID NO: 4914 - RNA, 19 nt, Artificial Sequence
  Synthetic Oligonucleotide
uugugcgacaauguuucaa

SEQ ID NO: 4915 - RNA, 19 nt, Artificial Sequence
  Synthetic Oligonucleotide
uugugcgacagugcuucaa

SEQ ID NO: 4916 - RNA, 19 nt, Artificial Sequence
  Synthetic Oligonucleotide
uugugcggcaaugcuucaa

SEQ ID NO: 4917 - RNA, 19 nt, Artificial Sequence
  Synthetic Oligonucleotide
uugugcgacaaugcuucau

SEQ ID NO: 4918 - RNA, 19 nt, Artificial Sequence
  Synthetic Oligonucleotide
uugugcgacaaugcuucua

SEQ ID NO: 4919 - RNA, 19 nt, Artificial Sequence
  Synthetic Oligonucleotide
uugugagacaaugcuucaa

SEQ ID NO: 4920 - RNA, 19 nt, Artificial Sequence
  Synthetic Oligonucleotide
uugugggacaaugcuucaa

SEQ ID NO: 4921 - RNA, 19 nt, Artificial Sequence
  Synthetic Oligonucleotide
ucgugcgacaaugcuucaa

SEQ ID NO: 4922 - RNA, 19 nt, Artificial Sequence
  Synthetic Oligonucleotide
gugugcgacaaugcuucaa

SEQ ID NO: 4923 - RNA, 19 nt, Artificial Sequence
  Synthetic Oligonucleotide
uugugcgacgcugcuucaa

SEQ ID NO: 4924 - RNA, 19 nt, Artificial Sequence
  Synthetic Oligonucleotide
uuguacgacaaugcuuuaa

SEQ ID NO: 4925 - RNA, 19 nt, Artificial Sequence
  Synthetic Oligonucleotide
uuguacggcaaugcuucaa

SEQ ID NO: 4926 - RNA, 19 nt, Artificial Sequence
  Synthetic Oligonucleotide
uugagggacaaugguucaa

SEQ ID NO: 4927 - RNA, 19 nt, Artificial Sequence
  Synthetic Oligonucleotide
cuugguucaacuccuucuu

SEQ ID NO: 4928 - RNA, 19 nt, Artificial Sequence
  Synthetic Oligonucleotide
cuugguuuaacuccuuccu

SEQ ID NO: 4929 - RNA, 19 nt, Artificial Sequence
  Synthetic Oligonucleotide
cuugguucaacuccuucau

SEQ ID NO: 4930 - RNA, 19 nt, Artificial Sequence
  Synthetic Oligonucleotide
cuugguucaacucauuccu

SEQ ID NO: 4931 - RNA, 19 nt, Artificial Sequence
  Synthetic Oligonucleotide
caugguucaacuccuuccu

SEQ ID NO: 4932 - RNA, 19 nt, Artificial Sequence
  Synthetic Oligonucleotide
ccugguucaacuccuuccu

SEQ ID NO: 4933 - RNA, 19 nt, Artificial Sequence
  Synthetic Oligonucleotide
cgugguucaacuccuuccu

SEQ ID NO: 4934 - RNA, 19 nt, Artificial Sequence
  Synthetic Oligonucleotide
cuugguucaacuccuccua

SEQ ID NO: 4935 - RNA, 19 nt, Artificial Sequence
  Synthetic Oligonucleotide
ucuugguucaacuccuucu

SEQ ID NO: 4936 - RNA, 19 nt, Artificial Sequence
  Synthetic Oligonucleotide
ucuugguuuaacuccuucc

SEQ ID NO: 4937 - RNA, 19 nt, Artificial Sequence
  Synthetic Oligonucleotide
ucuugguucaacuccuuca

SEQ ID NO: 4938 - RNA, 19 nt, Artificial Sequence
  Synthetic Oligonucleotide
ucuugguucaacucauucc

SEQ ID NO: 4939 - RNA, 19 nt, Artificial Sequence
  Synthetic Oligonucleotide
ucaugguucaacuccuucc

SEQ ID NO: 4940 - RNA, 19 nt, Artificial Sequence
  Synthetic Oligonucleotide
uccugguucaacuccuucc

SEQ ID NO: 4941 - RNA, 19 nt, Artificial Sequence
  Synthetic Oligonucleotide
ucgugguucaacuccuucc

SEQ ID NO: 4942 - RNA, 19 nt, Artificial Sequence
  Synthetic Oligonucleotide
ucuugguucaacuccuccu

SEQ ID NO: 4943 - RNA, 19 nt, Artificial Sequence
  Synthetic Oligonucleotide
uaaugauccuuggguuuug

SEQ ID NO: 4944 - RNA, 19 nt, Artificial Sequence
  Synthetic Oligonucleotide
uaaugaucccuggguucug

SEQ ID NO: 4945 - RNA, 19 nt, Artificial Sequence
  Synthetic Oligonucleotide
uaaugaucccugggcuuug

SEQ ID NO: 4946 - RNA, 19 nt, Artificial Sequence
  Synthetic Oligonucleotide
uaaugaccccuggguuuug

SEQ ID NO: 4947 - RNA, 19 nt, Artificial Sequence
  Synthetic Oligonucleotide
uaacgaucccuggguuuug

SEQ ID NO: 4948 - RNA, 19 nt, Artificial Sequence
  Synthetic Oligonucleotide
augauccuuggguuuugcu

SEQ ID NO: 4949 - RNA, 19 nt, Artificial Sequence
  Synthetic Oligonucleotide
augaucccuggguucugcu

SEQ ID NO: 4950 - RNA, 19 nt, Artificial Sequence
  Synthetic Oligonucleotide
augaucccugggcuuugcu

SEQ ID NO: 4951 - RNA, 19 nt, Artificial Sequence
  Synthetic Oligonucleotide
augaccccuggguuuugcu

SEQ ID NO: 4952 - RNA, 19 nt, Artificial Sequence
  Synthetic Oligonucleotide
acgaucccuggguuuugcu

SEQ ID NO: 4953 - RNA, 19 nt, Artificial Sequence
  Synthetic Oligonucleotide
aaugauccuuggguuuugc

SEQ ID NO: 4954 - RNA, 19 nt, Artificial Sequence
  Synthetic Oligonucleotide
aaugaucccuggguucugc

SEQ ID NO: 4955 - RNA, 19 nt, Artificial Sequence
  Synthetic Oligonucleotide
aaugaucccugggcuuugc

SEQ ID NO: 4956 - RNA, 19 nt, Artificial Sequence
  Synthetic Oligonucleotide
aaugaccccuggguuuugc

SEQ ID NO: 4957 - RNA, 19 nt, Artificial Sequence
  Synthetic Oligonucleotide
aacgaucccuggguuuugc

SEQ ID NO: 4958 - RNA, 19 nt, Artificial Sequence
  Synthetic Oligonucleotide
uuaaugauccuuggguuuu

SEQ ID NO: 4959 - RNA, 19 nt, Artificial Sequence
  Synthetic Oligonucleotide
uuaaugaucccuggguucu

SEQ ID NO: 4960 - RNA, 19 nt, Artificial Sequence
  Synthetic Oligonucleotide
uuaaugaucccugggcuuu

SEQ ID NO: 4961 - RNA, 19 nt, Artificial Sequence
  Synthetic Oligonucleotide
uuaaugaccccuggguuuu

SEQ ID NO: 4962 - RNA, 19 nt, Artificial Sequence
  Synthetic Oligonucleotide
uuaacgaucccuggguuuu

SEQ ID NO: 4963 - RNA, 19 nt, Artificial Sequence
  Synthetic Oligonucleotide
auuaaugauccuuggguuu

SEQ ID NO: 4964 - RNA, 19 nt, Artificial Sequence
  Synthetic Oligonucleotide
guuaaugaucccuggguuu

SEQ ID NO: 4965 - RNA, 19 nt, Artificial Sequence
  Synthetic Oligonucleotide
auuaaugaucccuggguuc

SEQ ID NO: 4966 - RNA, 19 nt, Artificial Sequence
  Synthetic Oligonucleotide
auuaaugaucccugggcuu

SEQ ID NO: 4967 - RNA, 19 nt, Artificial Sequence
  Synthetic Oligonucleotide
auuaaugaccccuggguuu

SEQ ID NO: 4968 - RNA, 19 nt, Artificial Sequence
  Synthetic Oligonucleotide
auuaacgaucccuggguuu

SEQ ID NO: 4969 - RNA, 19 nt, Artificial Sequence
  Synthetic Oligonucleotide
ccugauuaaugauccuugg

SEQ ID NO: 4970 - RNA, 19 nt, Artificial Sequence
  Synthetic Oligonucleotide
ccugguuaaugaucccugg

SEQ ID NO: 4971 - RNA, 19 nt, Artificial Sequence
  Synthetic Oligonucleotide
ccugauuaaugaccccugg

SEQ ID NO: 4972 - RNA, 19 nt, Artificial Sequence
  Synthetic Oligonucleotide
ccugauuaacgaucccugg

SEQ ID NO: 4973 - RNA, 19 nt, Artificial Sequence
  Synthetic Oligonucleotide
ccuaauuaaugaucccugg

SEQ ID NO: 4974 - RNA, 19 nt, Artificial Sequence
  Synthetic Oligonucleotide
ugggauuaaugaucccugg

SEQ ID NO: 4975 - RNA, 19 nt, Artificial Sequence
  Synthetic Oligonucleotide
ugccugauuaaugauccuu

SEQ ID NO: 4976 - RNA, 19 nt, Artificial Sequence
  Synthetic Oligonucleotide
ugccugguuaaugaucccu

SEQ ID NO: 4977 - RNA, 19 nt, Artificial Sequence
  Synthetic Oligonucleotide
ugccugauuaaugaccccu

SEQ ID NO: 4978 - RNA, 19 nt, Artificial Sequence
  Synthetic Oligonucleotide
ugccugauuaacgaucccu

SEQ ID NO: 4979 - RNA, 19 nt, Artificial Sequence
  Synthetic Oligonucleotide
ugccuaauuaaugaucccu

SEQ ID NO: 4980 - RNA, 19 nt, Artificial Sequence
  Synthetic Oligonucleotide
ugugggauuaaugaucccu

SEQ ID NO: 4981 - RNA, 19 nt, Artificial Sequence
  Synthetic Oligonucleotide
gccugauuaaugauccuug

SEQ ID NO: 4982 - RNA, 19 nt, Artificial Sequence
  Synthetic Oligonucleotide
gccugguuaaugaucccug

SEQ ID NO: 4983 - RNA, 19 nt, Artificial Sequence
  Synthetic Oligonucleotide
gccugauuaaugaccccug

SEQ ID NO: 4984 - RNA, 19 nt, Artificial Sequence
  Synthetic Oligonucleotide
gccugauuaacgaucccug

SEQ ID NO: 4985 - RNA, 19 nt, Artificial Sequence
  Synthetic Oligonucleotide
gccuaauuaaugaucccug

SEQ ID NO: 4986 - RNA, 19 nt, Artificial Sequence
  Synthetic Oligonucleotide
gugggauuaaugaucccug

SEQ ID NO: 4987 - RNA, 19 nt, Artificial Sequence
  Synthetic Oligonucleotide
cugauuaaugauccuuggg

SEQ ID NO: 4988 - RNA, 19 nt, Artificial Sequence
  Synthetic Oligonucleotide
cugguuaaugaucccuggg

SEQ ID NO: 4989 - RNA, 19 nt, Artificial Sequence
  Synthetic Oligonucleotide
cugauuaaugaccccuggg

SEQ ID NO: 4990 - RNA, 19 nt, Artificial Sequence
  Synthetic Oligonucleotide
cugauuaacgaucccuggg

SEQ ID NO: 4991 - RNA, 19 nt, Artificial Sequence
  Synthetic Oligonucleotide
cuaauuaaugaucccuggg

SEQ ID NO: 4992 - RNA, 19 nt, Artificial Sequence
  Synthetic Oligonucleotide
gggauuaaugaucccuggg

SEQ ID NO: 4993 - RNA, 19 nt, Artificial Sequence
  Synthetic Oligonucleotide
gauuaaugauccuuggguu

SEQ ID NO: 4994 - RNA, 19 nt, Artificial Sequence
  Synthetic Oligonucleotide
gguuaaugaucccuggguu

SEQ ID NO: 4995 - RNA, 19 nt, Artificial Sequence
  Synthetic Oligonucleotide
gauuaaugaucccugggcu

SEQ ID NO: 4996 - RNA, 19 nt, Artificial Sequence
  Synthetic Oligonucleotide
gauuaaugaccccuggguu

SEQ ID NO: 4997 - RNA, 19 nt, Artificial Sequence
  Synthetic Oligonucleotide
gauuaacgaucccuggguu

SEQ ID NO: 4998 - RNA, 19 nt, Artificial Sequence
  Synthetic Oligonucleotide
aauuaaugaucccuggguu

SEQ ID NO: 4999 - RNA, 19 nt, Artificial Sequence
  Synthetic Oligonucleotide
ugauuaaugauccuugggu

SEQ ID NO: 5000 - RNA, 19 nt, Artificial Sequence
  Synthetic Oligonucleotide
ugguuaaugaucccugggu

SEQ ID NO: 5001 - RNA, 19 nt, Artificial Sequence
  Synthetic Oligonucleotide
ugauuaaugaucccugggc

SEQ ID NO: 5002 - RNA, 19 nt, Artificial Sequence
  Synthetic Oligonucleotide
ugauuaaugaccccugggu

SEQ ID NO: 5003 - RNA, 19 nt, Artificial Sequence
  Synthetic Oligonucleotide
ugauuaacgaucccugggu

SEQ ID NO: 5004 - RNA, 19 nt, Artificial Sequence
  Synthetic Oligonucleotide
uaauuaaugaucccugggu

SEQ ID NO: 5005 - RNA, 19 nt, Artificial Sequence
  Synthetic Oligonucleotide
ggauuaaugaucccugggu

SEQ ID NO: 5006 - RNA, 19 nt, Artificial Sequence
  Synthetic Oligonucleotide
aggagugccugguuaauga

SEQ ID NO: 5007 - RNA, 19 nt, Artificial Sequence
  Synthetic Oligonucleotide
aggagugccugauuaacga

SEQ ID NO: 5008 - RNA, 19 nt, Artificial Sequence
  Synthetic Oligonucleotide
aggagugccuaauuaauga

SEQ ID NO: 5009 - RNA, 19 nt, Artificial Sequence
  Synthetic Oligonucleotide
aggaaugccugauuaauga

SEQ ID NO: 5010 - RNA, 19 nt, Artificial Sequence
  Synthetic Oligonucleotide
aggagugugggauuaauga

SEQ ID NO: 5011 - RNA, 19 nt, Artificial Sequence
  Synthetic Oligonucleotide
gaggagugccugguuaaug

SEQ ID NO: 5012 - RNA, 19 nt, Artificial Sequence
  Synthetic Oligonucleotide
gaggagugccugauuaacg

SEQ ID NO: 5013 - RNA, 19 nt, Artificial Sequence
  Synthetic Oligonucleotide
gaggagugccuaauuaaug

SEQ ID NO: 5014 - RNA, 19 nt, Artificial Sequence
  Synthetic Oligonucleotide
gaggaaugccugauuaaug

SEQ ID NO: 5015 - RNA, 19 nt, Artificial Sequence
  Synthetic Oligonucleotide
gaggagugugggauuaaug

SEQ ID NO: 5016 - RNA, 19 nt, Artificial Sequence
  Synthetic Oligonucleotide
ugaggagugccugguuaau

SEQ ID NO: 5017 - RNA, 19 nt, Artificial Sequence
  Synthetic Oligonucleotide
ugaggagugccugauuaac

SEQ ID NO: 5018 - RNA, 19 nt, Artificial Sequence
  Synthetic Oligonucleotide
ugaggagugccuaauuaau

SEQ ID NO: 5019 - RNA, 19 nt, Artificial Sequence
  Synthetic Oligonucleotide
ugaggaaugccugauuaau

SEQ ID NO: 5020 - RNA, 19 nt, Artificial Sequence
  Synthetic Oligonucleotide
cgaggagugccugauuaau

SEQ ID NO: 5021 - RNA, 19 nt, Artificial Sequence
  Synthetic Oligonucleotide
ugaggagugugggauuaau

SEQ ID NO: 5022 - RNA, 19 nt, Artificial Sequence
  Synthetic Oligonucleotide
aagauuuugugcgacagug

SEQ ID NO: 5023 - RNA, 19 nt, Artificial Sequence
  Synthetic Oligonucleotide
aagauuuugugcggcaaug

SEQ ID NO: 5024 - RNA, 19 nt, Artificial Sequence
  Synthetic Oligonucleotide
aggauuuugugcgacaaug

SEQ ID NO: 5025 - RNA, 19 nt, Artificial Sequence
  Synthetic Oligonucleotide
gagauuuugugcgacaaug

SEQ ID NO: 5026 - RNA, 19 nt, Artificial Sequence
  Synthetic Oligonucleotide
aagauuuugugagacaaug

SEQ ID NO: 5027 - RNA, 19 nt, Artificial Sequence
  Synthetic Oligonucleotide
aagauuuugugggacaaug

SEQ ID NO: 5028 - RNA, 19 nt, Artificial Sequence
  Synthetic Oligonucleotide
aagauuuuguacgacaaug

SEQ ID NO: 5029 - RNA, 19 nt, Artificial Sequence
  Synthetic Oligonucleotide
aagauuucgugcgacaaug

SEQ ID NO: 5030 - RNA, 19 nt, Artificial Sequence
  Synthetic Oligonucleotide
aagaucuugugcgacaaug

SEQ ID NO: 5031 - RNA, 19 nt, Artificial Sequence
  Synthetic Oligonucleotide
aagaauuugugcgacaaug

SEQ ID NO: 5032 - RNA, 19 nt, Artificial Sequence
  Synthetic Oligonucleotide
aagacuuugugcgacaaug

SEQ ID NO: 5033 - RNA, 19 nt, Artificial Sequence
  Synthetic Oligonucleotide
uagauuuugugcgacaaug

SEQ ID NO: 5034 - RNA, 19 nt, Artificial Sequence
  Synthetic Oligonucleotide
aagauuuugugcgacgcug

SEQ ID NO: 5035 - RNA, 19 nt, Artificial Sequence
  Synthetic Oligonucleotide
aagauuuuguacggcaaug

SEQ ID NO: 5036 - RNA, 19 nt, Artificial Sequence
  Synthetic Oligonucleotide
aagacuuugugcgacagug

SEQ ID NO: 5037 - RNA, 19 nt, Artificial Sequence
  Synthetic Oligonucleotide
aagacuuugugcggcaaug

SEQ ID NO: 5038 - RNA, 19 nt, Artificial Sequence
  Synthetic Oligonucleotide
gagaauuugugcgacaaug

SEQ ID NO: 5039 - RNA, 19 nt, Artificial Sequence
  Synthetic Oligonucleotide
gagacuuugugcgacaaug

SEQ ID NO: 5040 - RNA, 19 nt, Artificial Sequence
  Synthetic Oligonucleotide
aagauuuugagggacaaug

SEQ ID NO: 5041 - RNA, 19 nt, Artificial Sequence
  Synthetic Oligonucleotide
aagacugugugcgacaaug

SEQ ID NO: 5042 - RNA, 19 nt, Artificial Sequence
  Synthetic Oligonucleotide
gagugccugguuaaugauc

SEQ ID NO: 5043 - RNA, 19 nt, Artificial Sequence
  Synthetic Oligonucleotide
gagugccugauuaaugacc

SEQ ID NO: 5044 - RNA, 19 nt, Artificial Sequence
  Synthetic Oligonucleotide
gagugccugauuaacgauc

SEQ ID NO: 5045 - RNA, 19 nt, Artificial Sequence
  Synthetic Oligonucleotide
gagugccuaauuaaugauc

SEQ ID NO: 5046 - RNA, 19 nt, Artificial Sequence
  Synthetic Oligonucleotide
gaaugccugauuaaugauc

SEQ ID NO: 5047 - RNA, 19 nt, Artificial Sequence
  Synthetic Oligonucleotide
gagugugggauuaaugauc

SEQ ID NO: 5048 - RNA, 19 nt, Artificial Sequence
  Synthetic Oligonucleotide
agugccugguuaaugaucc

SEQ ID NO: 5049 - RNA, 19 nt, Artificial Sequence
  Synthetic Oligonucleotide
agugccugauuaaugaccc

SEQ ID NO: 5050 - RNA, 19 nt, Artificial Sequence
  Synthetic Oligonucleotide
agugccugauuaacgaucc

SEQ ID NO: 5051 - RNA, 19 nt, Artificial Sequence
  Synthetic Oligonucleotide
agugccuaauuaaugaucc

SEQ ID NO: 5052 - RNA, 19 nt, Artificial Sequence
  Synthetic Oligonucleotide
aaugccugauuaaugaucc

SEQ ID NO: 5053 - RNA, 19 nt, Artificial Sequence
  Synthetic Oligonucleotide
agugugggauuaaugaucc

SEQ ID NO: 5054 - RNA, 19 nt, Artificial Sequence
  Synthetic Oligonucleotide
ggagugccugguuaaugau

SEQ ID NO: 5055 - RNA, 19 nt, Artificial Sequence
  Synthetic Oligonucleotide
ggagugccugauuaaugac

SEQ ID NO: 5056 - RNA, 19 nt, Artificial Sequence
  Synthetic Oligonucleotide
ggagugccugauuaacgau

SEQ ID NO: 5057 - RNA, 19 nt, Artificial Sequence
  Synthetic Oligonucleotide
ggagugccuaauuaaugau

SEQ ID NO: 5058 - RNA, 19 nt, Artificial Sequence
  Synthetic Oligonucleotide
ggaaugccugauuaaugau

SEQ ID NO: 5059 - RNA, 19 nt, Artificial Sequence
  Synthetic Oligonucleotide
ggagugugggauuaaugau

SEQ ID NO: 5060 - RNA, 19 nt, Artificial Sequence
  Synthetic Oligonucleotide
gugccugauuaaugauccu

SEQ ID NO: 5061 - RNA, 19 nt, Artificial Sequence
  Synthetic Oligonucleotide
gugccugguuaaugauccc

SEQ ID NO: 5062 - RNA, 19 nt, Artificial Sequence
  Synthetic Oligonucleotide
gugccugauuaaugacccc

SEQ ID NO: 5063 - RNA, 19 nt, Artificial Sequence
  Synthetic Oligonucleotide
gugccugauuaacgauccc

SEQ ID NO: 5064 - RNA, 19 nt, Artificial Sequence
  Synthetic Oligonucleotide
gugccuaauuaaugauccc

SEQ ID NO: 5065 - RNA, 19 nt, Artificial Sequence
  Synthetic Oligonucleotide
augccugauuaaugauccc

SEQ ID NO: 5066 - RNA, 19 nt, Artificial Sequence
  Synthetic Oligonucleotide
gugugggauuaaugauccc

SEQ ID NO: 5067 - RNA, 19 nt, Artificial Sequence
  Synthetic Oligonucleotide
acaaauuugcggcaauaug

SEQ ID NO: 5068 - RNA, 19 nt, Artificial Sequence
  Synthetic Oligonucleotide
auaaauuugcagcaauaug

SEQ ID NO: 5069 - RNA, 19 nt, Artificial Sequence
  Synthetic Oligonucleotide
acaaauuugccgcaauaug

SEQ ID NO: 5070 - RNA, 19 nt, Artificial Sequence
  Synthetic Oligonucleotide
acaaauuugcugcaauaug

SEQ ID NO: 5071 - RNA, 19 nt, Artificial Sequence
  Synthetic Oligonucleotide
acaaauucgcagcaauaug

SEQ ID NO: 5072 - RNA, 19 nt, Artificial Sequence
  Synthetic Oligonucleotide
acaaacuugcagcaauaug

SEQ ID NO: 5073 - RNA, 19 nt, Artificial Sequence
  Synthetic Oligonucleotide
acaaguuugcugcaauaug

SEQ ID NO: 5074 - RNA, 19 nt, Artificial Sequence
  Synthetic Oligonucleotide
acaaauucgccgcaauaug

SEQ ID NO: 5075 - RNA, 19 nt, Artificial Sequence
  Synthetic Oligonucleotide
acaaauucgcugcaauaug

SEQ ID NO: 5076 - RNA, 19 nt, Artificial Sequence
  Synthetic Oligonucleotide
acaaguucgcugcaauaug

SEQ ID NO: 5077 - RNA, 19 nt, Artificial Sequence
  Synthetic Oligonucleotide
aacaaauuugcggcaauau

SEQ ID NO: 5078 - RNA, 19 nt, Artificial Sequence
  Synthetic Oligonucleotide
aauaaauuugcagcaauau

SEQ ID NO: 5079 - RNA, 19 nt, Artificial Sequence
  Synthetic Oligonucleotide
aacaaauuugccgcaauau

SEQ ID NO: 5080 - RNA, 19 nt, Artificial Sequence
  Synthetic Oligonucleotide
aacaaauuugcugcaauau

SEQ ID NO: 5081 - RNA, 19 nt, Artificial Sequence
  Synthetic Oligonucleotide
aacaaauucgcagcaauau

SEQ ID NO: 5082 - RNA, 19 nt, Artificial Sequence
  Synthetic Oligonucleotide
aacaaacuugcagcaauau

SEQ ID NO: 5083 - RNA, 19 nt, Artificial Sequence
  Synthetic Oligonucleotide
aacaaguuugcugcaauau

SEQ ID NO: 5084 - RNA, 19 nt, Artificial Sequence
  Synthetic Oligonucleotide
aacaaauucgccgcaauau

SEQ ID NO: 5085 - RNA, 19 nt, Artificial Sequence
  Synthetic Oligonucleotide
aacaaauucgcugcaauau

SEQ ID NO: 5086 - RNA, 19 nt, Artificial Sequence
  Synthetic Oligonucleotide
aacaaguucgcugcaauau

SEQ ID NO: 5087 - RNA, 19 nt, Artificial Sequence
  Synthetic Oligonucleotide
aaauuugcagcaauaugua

SEQ ID NO: 5088 - RNA, 19 nt, Artificial Sequence
  Synthetic Oligonucleotide
aaauuugcggcaauaugca

SEQ ID NO: 5089 - RNA, 19 nt, Artificial Sequence
  Synthetic Oligonucleotide
aaauuugccgcaauaugca

SEQ ID NO: 5090 - RNA, 19 nt, Artificial Sequence
  Synthetic Oligonucleotide
aaauuugcugcaauaugca

SEQ ID NO: 5091 - RNA, 19 nt, Artificial Sequence
  Synthetic Oligonucleotide
aaauucgcagcaauaugca

SEQ ID NO: 5092 - RNA, 19 nt, Artificial Sequence
  Synthetic Oligonucleotide
aaacuugcagcaauaugca

SEQ ID NO: 5093 - RNA, 19 nt, Artificial Sequence
  Synthetic Oligonucleotide
aaauuugcugcaauaugua

SEQ ID NO: 5094 - RNA, 19 nt, Artificial Sequence
  Synthetic Oligonucleotide
aaguuugcugcaauaugca

SEQ ID NO: 5095 - RNA, 19 nt, Artificial Sequence
  Synthetic Oligonucleotide
aaauucgccgcaauaugca

SEQ ID NO: 5096 - RNA, 19 nt, Artificial Sequence
  Synthetic Oligonucleotide
aaauucgcugcaauaugca

SEQ ID NO: 5097 - RNA, 19 nt, Artificial Sequence
  Synthetic Oligonucleotide
aaguucgcugcaauaugca

SEQ ID NO: 5098 - RNA, 19 nt, Artificial Sequence
  Synthetic Oligonucleotide
caaauuugcagcaauaugu

SEQ ID NO: 5099 - RNA, 19 nt, Artificial Sequence
  Synthetic Oligonucleotide
caaauuugcggcaauaugc

SEQ ID NO: 5100 - RNA, 19 nt, Artificial Sequence
  Synthetic Oligonucleotide
uaaauuugcagcaauaugc

SEQ ID NO: 5101 - RNA, 19 nt, Artificial Sequence
  Synthetic Oligonucleotide
caaauuugccgcaauaugc

SEQ ID NO: 5102 - RNA, 19 nt, Artificial Sequence
  Synthetic Oligonucleotide
caaauuugcugcaauaugc

SEQ ID NO: 5103 - RNA, 19 nt, Artificial Sequence
  Synthetic Oligonucleotide
caaauucgcagcaauaugc

SEQ ID NO: 5104 - RNA, 19 nt, Artificial Sequence
  Synthetic Oligonucleotide
caaacuugcagcaauaugc

SEQ ID NO: 5105 - RNA, 19 nt, Artificial Sequence
  Synthetic Oligonucleotide
caaauuugcugcaauaugu

SEQ ID NO: 5106 - RNA, 19 nt, Artificial Sequence
  Synthetic Oligonucleotide
caaguuugcugcaauaugc

SEQ ID NO: 5107 - RNA, 19 nt, Artificial Sequence
  Synthetic Oligonucleotide
caaauucgccgcaauaugc

SEQ ID NO: 5108 - RNA, 19 nt, Artificial Sequence
  Synthetic Oligonucleotide
caaauucgcugcaauaugc

SEQ ID NO: 5109 - RNA, 19 nt, Artificial Sequence
  Synthetic Oligonucleotide
caaguucgcugcaauaugc

SEQ ID NO: 5110 - RNA, 19 nt, Artificial Sequence
  Synthetic Oligonucleotide
aauuugcagcaauaugcau

SEQ ID NO: 5111 - RNA, 19 nt, Artificial Sequence
  Synthetic Oligonucleotide
aauuugcagcaauauguac

SEQ ID NO: 5112 - RNA, 19 nt, Artificial Sequence
  Synthetic Oligonucleotide
aauuugcggcaauaugcac

SEQ ID NO: 5113 - RNA, 19 nt, Artificial Sequence
  Synthetic Oligonucleotide
aauuugccgcaauaugcac

SEQ ID NO: 5114 - RNA, 19 nt, Artificial Sequence
  Synthetic Oligonucleotide
aauuugcugcaauaugcac

SEQ ID NO: 5115 - RNA, 19 nt, Artificial Sequence
  Synthetic Oligonucleotide
aauucgcagcaauaugcac

SEQ ID NO: 5116 - RNA, 19 nt, Artificial Sequence
  Synthetic Oligonucleotide
aacuugcagcaauaugcac

SEQ ID NO: 5117 - RNA, 19 nt, Artificial Sequence
  Synthetic Oligonucleotide
aauuugcugcaauauguac

SEQ ID NO: 5118 - RNA, 19 nt, Artificial Sequence
  Synthetic Oligonucleotide
aguuugcugcaauaugcac

SEQ ID NO: 5119 - RNA, 19 nt, Artificial Sequence
  Synthetic Oligonucleotide
aauucgccgcaauaugcac

SEQ ID NO: 5120 - RNA, 19 nt, Artificial Sequence
  Synthetic Oligonucleotide
aauucgcugcaauaugcac

SEQ ID NO: 5121 - RNA, 19 nt, Artificial Sequence
  Synthetic Oligonucleotide
aguucgcugcaauaugcac

SEQ ID NO: 5122 - RNA, 19 nt, Artificial Sequence
  Synthetic Oligonucleotide
auggaagauuuugugcggc

SEQ ID NO: 5123 - RNA, 19 nt, Artificial Sequence
  Synthetic Oligonucleotide
auggaggauuuugugcgac

SEQ ID NO: 5124 - RNA, 19 nt, Artificial Sequence
  Synthetic Oligonucleotide
auggaagauuuugugagac

SEQ ID NO: 5125 - RNA, 19 nt, Artificial Sequence
  Synthetic Oligonucleotide
auggaagauuuugugggac

SEQ ID NO: 5126 - RNA, 19 nt, Artificial Sequence
  Synthetic Oligonucleotide
auggaagauuuuguacgac

SEQ ID NO: 5127 - RNA, 19 nt, Artificial Sequence
  Synthetic Oligonucleotide
auggaagauuucgugcgac

SEQ ID NO: 5128 - RNA, 19 nt, Artificial Sequence
  Synthetic Oligonucleotide
auggaagaucuugugcgac

SEQ ID NO: 5129 - RNA, 19 nt, Artificial Sequence
  Synthetic Oligonucleotide
auggaagaauuugugcgac

SEQ ID NO: 5130 - RNA, 19 nt, Artificial Sequence
  Synthetic Oligonucleotide
auggaagacuuugugcgac

SEQ ID NO: 5131 - RNA, 19 nt, Artificial Sequence
  Synthetic Oligonucleotide
auggaagauuuuguacggc

SEQ ID NO: 5132 - RNA, 19 nt, Artificial Sequence
  Synthetic Oligonucleotide
auggaagacuuugugcggc

SEQ ID NO: 5133 - RNA, 19 nt, Artificial Sequence
  Synthetic Oligonucleotide
auggaagauuuugagggac

SEQ ID NO: 5134 - RNA, 19 nt, Artificial Sequence
  Synthetic Oligonucleotide
auggaagacugugugcgac

SEQ ID NO: 5135 - RNA, 19 nt, Artificial Sequence
  Synthetic Oligonucleotide
uggaagauuuugugcgacg

SEQ ID NO: 5136 - RNA, 19 nt, Artificial Sequence
  Synthetic Oligonucleotide
uggaagauuuugugcggca

SEQ ID NO: 5137 - RNA, 19 nt, Artificial Sequence
  Synthetic Oligonucleotide
uggaggauuuugugcgaca

SEQ ID NO: 5138 - RNA, 19 nt, Artificial Sequence
  Synthetic Oligonucleotide
uggaagauuuugugagaca

SEQ ID NO: 5139 - RNA, 19 nt, Artificial Sequence
  Synthetic Oligonucleotide
uggaagauuuugugggaca

SEQ ID NO: 5140 - RNA, 19 nt, Artificial Sequence
  Synthetic Oligonucleotide
uggaagauuuuguacgaca

SEQ ID NO: 5141 - RNA, 19 nt, Artificial Sequence
  Synthetic Oligonucleotide
uggaagauuucgugcgaca

SEQ ID NO: 5142 - RNA, 19 nt, Artificial Sequence
  Synthetic Oligonucleotide
uggaagaucuugugcgaca

SEQ ID NO: 5143 - RNA, 19 nt, Artificial Sequence
  Synthetic Oligonucleotide
uggaagaauuugugcgaca

SEQ ID NO: 5144 - RNA, 19 nt, Artificial Sequence
  Synthetic Oligonucleotide
uggaagacuuugugcgaca

SEQ ID NO: 5145 - RNA, 19 nt, Artificial Sequence
  Synthetic Oligonucleotide
uggaagauuuuguacggca

SEQ ID NO: 5146 - RNA, 19 nt, Artificial Sequence
  Synthetic Oligonucleotide
uggaagacuuugugcggca

SEQ ID NO: 5147 - RNA, 19 nt, Artificial Sequence
  Synthetic Oligonucleotide
uggaagauuuugagggaca

SEQ ID NO: 5148 - RNA, 19 nt, Artificial Sequence
  Synthetic Oligonucleotide
uggaagacugugugcgaca

SEQ ID NO: 5149 - RNA, 19 nt, Artificial Sequence
  Synthetic Oligonucleotide
uuuuagagccuauguagau

SEQ ID NO: 5150 - RNA, 19 nt, Artificial Sequence
  Synthetic Oligonucleotide
uuuuagaaccuauguggau

SEQ ID NO: 5151 - RNA, 19 nt, Artificial Sequence
  Synthetic Oligonucleotide
uuuuaaagccuauguggau

SEQ ID NO: 5152 - RNA, 19 nt, Artificial Sequence
  Synthetic Oligonucleotide
auuuagagccuauguggau

SEQ ID NO: 5153 - RNA, 19 nt, Artificial Sequence
  Synthetic Oligonucleotide
cuuuagagccuauguggau

SEQ ID NO: 5154 - RNA, 19 nt, Artificial Sequence
  Synthetic Oligonucleotide
cuuuagagccuauguagau

SEQ ID NO: 5155 - RNA, 19 nt, Artificial Sequence
  Synthetic Oligonucleotide
cuuuagagcauauguggau

SEQ ID NO: 5156 - RNA, 19 nt, Artificial Sequence
  Synthetic Oligonucleotide
cuuuagaaccuauguggau

SEQ ID NO: 5157 - RNA, 19 nt, Artificial Sequence
  Synthetic Oligonucleotide
aguuuuagagccuaugugg

SEQ ID NO: 5158 - RNA, 19 nt, Artificial Sequence
  Synthetic Oligonucleotide
aauuuuagagccuauguag

SEQ ID NO: 5159 - RNA, 19 nt, Artificial Sequence
  Synthetic Oligonucleotide
aauuuuagaaccuaugugg

SEQ ID NO: 5160 - RNA, 19 nt, Artificial Sequence
  Synthetic Oligonucleotide
aauuuuaaagccuaugugg

SEQ ID NO: 5161 - RNA, 19 nt, Artificial Sequence
  Synthetic Oligonucleotide
aaauuuagagccuaugugg

SEQ ID NO: 5162 - RNA, 19 nt, Artificial Sequence
  Synthetic Oligonucleotide
aacuuuagagccuaugugg

SEQ ID NO: 5163 - RNA, 19 nt, Artificial Sequence
  Synthetic Oligonucleotide
auuuuuagagccuaugugg

SEQ ID NO: 5164 - RNA, 19 nt, Artificial Sequence
  Synthetic Oligonucleotide
aacuuuagagccuauguag

SEQ ID NO: 5165 - RNA, 19 nt, Artificial Sequence
  Synthetic Oligonucleotide
aacuuuagagcauaugugg

SEQ ID NO: 5166 - RNA, 19 nt, Artificial Sequence
  Synthetic Oligonucleotide
aacuuuagaaccuaugugg

SEQ ID NO: 5167 - RNA, 19 nt, Artificial Sequence
  Synthetic Oligonucleotide
accuuuagagccuaugugg

SEQ ID NO: 5168 - RNA, 19 nt, Artificial Sequence
  Synthetic Oligonucleotide
guuuuagagccuaugugga

SEQ ID NO: 5169 - RNA, 19 nt, Artificial Sequence
  Synthetic Oligonucleotide
auuuuagagccuauguaga

SEQ ID NO: 5170 - RNA, 19 nt, Artificial Sequence
  Synthetic Oligonucleotide
auuuuagaaccuaugugga

SEQ ID NO: 5171 - RNA, 19 nt, Artificial Sequence
  Synthetic Oligonucleotide
auuuuaaagccuaugugga

SEQ ID NO: 5172 - RNA, 19 nt, Artificial Sequence
  Synthetic Oligonucleotide
aauuuagagccuaugugga

SEQ ID NO: 5173 - RNA, 19 nt, Artificial Sequence
  Synthetic Oligonucleotide
acuuuagagccuaugugga

SEQ ID NO: 5174 - RNA, 19 nt, Artificial Sequence
  Synthetic Oligonucleotide
uuuuuagagccuaugugga

SEQ ID NO: 5175 - RNA, 19 nt, Artificial Sequence
  Synthetic Oligonucleotide
acuuuagagccuauguaga

SEQ ID NO: 5176 - RNA, 19 nt, Artificial Sequence
  Synthetic Oligonucleotide
acuuuagagcauaugugga

SEQ ID NO: 5177 - RNA, 19 nt, Artificial Sequence
  Synthetic Oligonucleotide
acuuuagaaccuaugugga

SEQ ID NO: 5178 - RNA, 19 nt, Artificial Sequence
  Synthetic Oligonucleotide
ccuuuagagccuaugugga

SEQ ID NO: 5179 - RNA, 19 nt, Artificial Sequence
  Synthetic Oligonucleotide
gaagauuuugugcgacagu

SEQ ID NO: 5180 - RNA, 19 nt, Artificial Sequence
  Synthetic Oligonucleotide
gaagauuuugugcggcaau

SEQ ID NO: 5181 - RNA, 19 nt, Artificial Sequence
  Synthetic Oligonucleotide
gaggauuuugugcgacaau

SEQ ID NO: 5182 - RNA, 19 nt, Artificial Sequence
  Synthetic Oligonucleotide
ggagauuuugugcgacaau

SEQ ID NO: 5183 - RNA, 19 nt, Artificial Sequence
  Synthetic Oligonucleotide
gaagauuuugugagacaau

SEQ ID NO: 5184 - RNA, 19 nt, Artificial Sequence
  Synthetic Oligonucleotide
gaagauuuugugggacaau

SEQ ID NO: 5185 - RNA, 19 nt, Artificial Sequence
  Synthetic Oligonucleotide
gaagauuuuguacgacaau

SEQ ID NO: 5186 - RNA, 19 nt, Artificial Sequence
  Synthetic Oligonucleotide
gaagauuucgugcgacaau

SEQ ID NO: 5187 - RNA, 19 nt, Artificial Sequence
  Synthetic Oligonucleotide
gaagaucuugugcgacaau

SEQ ID NO: 5188 - RNA, 19 nt, Artificial Sequence
  Synthetic Oligonucleotide
gaagaauuugugcgacaau

SEQ ID NO: 5189 - RNA, 19 nt, Artificial Sequence
  Synthetic Oligonucleotide
gaagacuuugugcgacaau

SEQ ID NO: 5190 - RNA, 19 nt, Artificial Sequence
  Synthetic Oligonucleotide
guagauuuugugcgacaau

SEQ ID NO: 5191 - RNA, 19 nt, Artificial Sequence
  Synthetic Oligonucleotide
gaagauuuugugcgacgcu

SEQ ID NO: 5192 - RNA, 19 nt, Artificial Sequence
  Synthetic Oligonucleotide
gaagauuuuguacggcaau

SEQ ID NO: 5193 - RNA, 19 nt, Artificial Sequence
  Synthetic Oligonucleotide
gaagacuuugugcgacagu

SEQ ID NO: 5194 - RNA, 19 nt, Artificial Sequence
  Synthetic Oligonucleotide
gaagacuuugugcggcaau

SEQ ID NO: 5195 - RNA, 19 nt, Artificial Sequence
  Synthetic Oligonucleotide
gaagauuuugagggacaau

SEQ ID NO: 5196 - RNA, 19 nt, Artificial Sequence
  Synthetic Oligonucleotide
gaagacugugugcgacaau

SEQ ID NO: 5197 - RNA, 19 nt, Artificial Sequence
  Synthetic Oligonucleotide
agagaauuugugcgacaau

SEQ ID NO: 5198 - RNA, 19 nt, Artificial Sequence
  Synthetic Oligonucleotide
ucauguauucggauuuuca

SEQ ID NO: 5199 - RNA, 19 nt, Artificial Sequence
  Synthetic Oligonucleotide
uuauguauucagauuuuca

SEQ ID NO: 5200 - RNA, 19 nt, Artificial Sequence
  Synthetic Oligonucleotide
ucauguauucagauuucca

SEQ ID NO: 5201 - RNA, 19 nt, Artificial Sequence
  Synthetic Oligonucleotide
ucauguauucagacuuuca

SEQ ID NO: 5202 - RNA, 19 nt, Artificial Sequence
  Synthetic Oligonucleotide
ucauguacucagauuuuca

SEQ ID NO: 5203 - RNA, 19 nt, Artificial Sequence
  Synthetic Oligonucleotide
uaauguauucagauuuuca

SEQ ID NO: 5204 - RNA, 19 nt, Artificial Sequence
  Synthetic Oligonucleotide
ucauguauucggauuucca

SEQ ID NO: 5205 - RNA, 19 nt, Artificial Sequence
  Synthetic Oligonucleotide
ucauguauucggacuuuca

SEQ ID NO: 5206 - RNA, 19 nt, Artificial Sequence
  Synthetic Oligonucleotide
uuauguauucggauuucca

SEQ ID NO: 5207 - RNA, 19 nt, Artificial Sequence
  Synthetic Oligonucleotide
ucauguauucagacuucca

SEQ ID NO: 5208 - RNA, 19 nt, Artificial Sequence
  Synthetic Oligonucleotide
uucauguauucggauuuuc

SEQ ID NO: 5209 - RNA, 19 nt, Artificial Sequence
  Synthetic Oligonucleotide
uuuauguauucagauuuuc

SEQ ID NO: 5210 - RNA, 19 nt, Artificial Sequence
  Synthetic Oligonucleotide
uucauguauucagauuucc

SEQ ID NO: 5211 - RNA, 19 nt, Artificial Sequence
  Synthetic Oligonucleotide
uucauguauucagacuuuc

SEQ ID NO: 5212 - RNA, 19 nt, Artificial Sequence
  Synthetic Oligonucleotide
uucauguacucagauuuuc

SEQ ID NO: 5213 - RNA, 19 nt, Artificial Sequence
  Synthetic Oligonucleotide
uuaauguauucagauuuuc

SEQ ID NO: 5214 - RNA, 19 nt, Artificial Sequence
  Synthetic Oligonucleotide
cucauguauucagauuuuc

SEQ ID NO: 5215 - RNA, 19 nt, Artificial Sequence
  Synthetic Oligonucleotide
uucauguauucggauuucc

SEQ ID NO: 5216 - RNA, 19 nt, Artificial Sequence
  Synthetic Oligonucleotide
uucauguauucggacuuuc

SEQ ID NO: 5217 - RNA, 19 nt, Artificial Sequence
  Synthetic Oligonucleotide
uuuauguauucggauuucc

SEQ ID NO: 5218 - RNA, 19 nt, Artificial Sequence
  Synthetic Oligonucleotide
uucauguauucagacuucc

SEQ ID NO: 5219 - RNA, 19 nt, Artificial Sequence
  Synthetic Oligonucleotide
gcauccugugcagcgaugg

SEQ ID NO: 5220 - RNA, 19 nt, Artificial Sequence
  Synthetic Oligonucleotide
gcauccugugcaguaaugg

SEQ ID NO: 5221 - RNA, 19 nt, Artificial Sequence
  Synthetic Oligonucleotide
gcauccuguguagcaaugg

SEQ ID NO: 5222 - RNA, 19 nt, Artificial Sequence
  Synthetic Oligonucleotide
gcaucuugugcagcaaugg

SEQ ID NO: 5223 - RNA, 19 nt, Artificial Sequence
  Synthetic Oligonucleotide
gcguccugugcagcaaugg

SEQ ID NO: 5224 - RNA, 19 nt, Artificial Sequence
  Synthetic Oligonucleotide
gcauccugugcagccaugg

SEQ ID NO: 5225 - RNA, 19 nt, Artificial Sequence
  Synthetic Oligonucleotide
gcauccugugcagcuaugg

SEQ ID NO: 5226 - RNA, 19 nt, Artificial Sequence
  Synthetic Oligonucleotide
gcauccugcgcagcaaugg

SEQ ID NO: 5227 - RNA, 19 nt, Artificial Sequence
  Synthetic Oligonucleotide
gcaucuugugcagccaugg

SEQ ID NO: 5228 - RNA, 19 nt, Artificial Sequence
  Synthetic Oligonucleotide
gcaucuugugcagucaugg

SEQ ID NO: 5229 - RNA, 19 nt, Artificial Sequence
  Synthetic Oligonucleotide
gcaucuugugcaguuaugg

SEQ ID NO: 5230 - RNA, 19 nt, Artificial Sequence
  Synthetic Oligonucleotide
gcauccugcgcagccaugg

SEQ ID NO: 5231 - RNA, 19 nt, Artificial Sequence
  Synthetic Oligonucleotide
augcauccugugcagcgau

SEQ ID NO: 5232 - RNA, 19 nt, Artificial Sequence
  Synthetic Oligonucleotide
augcauccugugcaguaau

SEQ ID NO: 5233 - RNA, 19 nt, Artificial Sequence
  Synthetic Oligonucleotide
augcauccuguguagcaau

SEQ ID NO: 5234 - RNA, 19 nt, Artificial Sequence
  Synthetic Oligonucleotide
augcaucuugugcagcaau

SEQ ID NO: 5235 - RNA, 19 nt, Artificial Sequence
  Synthetic Oligonucleotide
augcguccugugcagcaau

SEQ ID NO: 5236 - RNA, 19 nt, Artificial Sequence
  Synthetic Oligonucleotide
augcauccugugcagccau

SEQ ID NO: 5237 - RNA, 19 nt, Artificial Sequence
  Synthetic Oligonucleotide
augcauccugugcagcuau

SEQ ID NO: 5238 - RNA, 19 nt, Artificial Sequence
  Synthetic Oligonucleotide
augcauccugcgcagcaau

SEQ ID NO: 5239 - RNA, 19 nt, Artificial Sequence
  Synthetic Oligonucleotide
augcaucuugugcagccau

SEQ ID NO: 5240 - RNA, 19 nt, Artificial Sequence
  Synthetic Oligonucleotide
augcaucuugugcagucau

SEQ ID NO: 5241 - RNA, 19 nt, Artificial Sequence
  Synthetic Oligonucleotide
augcaucuugugcaguuau

SEQ ID NO: 5242 - RNA, 19 nt, Artificial Sequence
  Synthetic Oligonucleotide
augcauccugcgcagccau

SEQ ID NO: 5243 - RNA, 19 nt, Artificial Sequence
  Synthetic Oligonucleotide
aaugcauccugugcagcga

SEQ ID NO: 5244 - RNA, 19 nt, Artificial Sequence
  Synthetic Oligonucleotide
aaugcauccugugcaguaa

SEQ ID NO: 5245 - RNA, 19 nt, Artificial Sequence
  Synthetic Oligonucleotide
aaugcauccuguguagcaa

SEQ ID NO: 5246 - RNA, 19 nt, Artificial Sequence
  Synthetic Oligonucleotide
aaugcaucuugugcagcaa

SEQ ID NO: 5247 - RNA, 19 nt, Artificial Sequence
  Synthetic Oligonucleotide
aaugcguccugugcagcaa

SEQ ID NO: 5248 - RNA, 19 nt, Artificial Sequence
  Synthetic Oligonucleotide
aaugcauccugugcagcca

SEQ ID NO: 5249 - RNA, 19 nt, Artificial Sequence
  Synthetic Oligonucleotide
aaugcauccugugcagcua

SEQ ID NO: 5250 - RNA, 19 nt, Artificial Sequence
  Synthetic Oligonucleotide
aaugcauccugcgcagcaa

SEQ ID NO: 5251 - RNA, 19 nt, Artificial Sequence
  Synthetic Oligonucleotide
aaugcaucuugugcagcca

SEQ ID NO: 5252 - RNA, 19 nt, Artificial Sequence
  Synthetic Oligonucleotide
aaugcaucuugugcaguca

SEQ ID NO: 5253 - RNA, 19 nt, Artificial Sequence
  Synthetic Oligonucleotide
aaugcaucuugugcaguua

SEQ ID NO: 5254 - RNA, 19 nt, Artificial Sequence
  Synthetic Oligonucleotide
aaugcauccugcgcagcca

SEQ ID NO: 5255 - RNA, 19 nt, Artificial Sequence
  Synthetic Oligonucleotide
ugcauccugugcagcgaug

SEQ ID NO: 5256 - RNA, 19 nt, Artificial Sequence
  Synthetic Oligonucleotide
ugcauccugugcaguaaug

SEQ ID NO: 5257 - RNA, 19 nt, Artificial Sequence
  Synthetic Oligonucleotide
ugcauccuguguagcaaug

SEQ ID NO: 5258 - RNA, 19 nt, Artificial Sequence
  Synthetic Oligonucleotide
ugcaucuugugcagcaaug

SEQ ID NO: 5259 - RNA, 19 nt, Artificial Sequence
  Synthetic Oligonucleotide
ugcguccugugcagcaaug

SEQ ID NO: 5260 - RNA, 19 nt, Artificial Sequence
  Synthetic Oligonucleotide
ugcauccugugcagccaug

SEQ ID NO: 5261 - RNA, 19 nt, Artificial Sequence
  Synthetic Oligonucleotide
ugcauccugugcagcuaug

SEQ ID NO: 5262 - RNA, 19 nt, Artificial Sequence
  Synthetic Oligonucleotide
ugcauccugcgcagcaaug

SEQ ID NO: 5263 - RNA, 19 nt, Artificial Sequence
  Synthetic Oligonucleotide
ugcaucuugugcagccaug

SEQ ID NO: 5264 - RNA, 19 nt, Artificial Sequence
  Synthetic Oligonucleotide
ugcaucuugugcagucaug

SEQ ID NO: 5265 - RNA, 19 nt, Artificial Sequence
  Synthetic Oligonucleotide
ugcaucuugugcaguuaug

SEQ ID NO: 5266 - RNA, 19 nt, Artificial Sequence
  Synthetic Oligonucleotide
ugcauccugcgcagccaug

SEQ ID NO: 5267 - RNA, 19 nt, Artificial Sequence
  Synthetic Oligonucleotide
cauccugugcagcgaugga

SEQ ID NO: 5268 - RNA, 19 nt, Artificial Sequence
  Synthetic Oligonucleotide
cauccugugcaguaaugga

SEQ ID NO: 5269 - RNA, 19 nt, Artificial Sequence
  Synthetic Oligonucleotide
cauccuguguagcaaugga

SEQ ID NO: 5270 - RNA, 19 nt, Artificial Sequence
  Synthetic Oligonucleotide
caucuugugcagcaaugga

SEQ ID NO: 5271 - RNA, 19 nt, Artificial Sequence
  Synthetic Oligonucleotide
cguccugugcagcaaugga

SEQ ID NO: 5272 - RNA, 19 nt, Artificial Sequence
  Synthetic Oligonucleotide
cauccugugcagccaugga

SEQ ID NO: 5273 - RNA, 19 nt, Artificial Sequence
  Synthetic Oligonucleotide
cauccugugcagcuaugga

SEQ ID NO: 5274 - RNA, 19 nt, Artificial Sequence
  Synthetic Oligonucleotide
cauccugcgcagcaaugga

SEQ ID NO: 5275 - RNA, 19 nt, Artificial Sequence
  Synthetic Oligonucleotide
caucuugugcagccaugga

SEQ ID NO: 5276 - RNA, 19 nt, Artificial Sequence
  Synthetic Oligonucleotide
caucuugugcagucaugga

SEQ ID NO: 5277 - RNA, 19 nt, Artificial Sequence
  Synthetic Oligonucleotide
caucuugugcaguuaugga

SEQ ID NO: 5278 - RNA, 19 nt, Artificial Sequence
  Synthetic Oligonucleotide
cauccugcgcagccaugga

SEQ ID NO: 5279 - RNA, 19 nt, Artificial Sequence
  Synthetic Oligonucleotide
gauuuugugcgacaauguu

SEQ ID NO: 5280 - RNA, 19 nt, Artificial Sequence
  Synthetic Oligonucleotide
gauuuugugcgacagugcu

SEQ ID NO: 5281 - RNA, 19 nt, Artificial Sequence
  Synthetic Oligonucleotide
gauuuugugcggcaaugcu

SEQ ID NO: 5282 - RNA, 19 nt, Artificial Sequence
  Synthetic Oligonucleotide
gauuuugugagacaaugcu

SEQ ID NO: 5283 - RNA, 19 nt, Artificial Sequence
  Synthetic Oligonucleotide
gauuuugugggacaaugcu

SEQ ID NO: 5284 - RNA, 19 nt, Artificial Sequence
  Synthetic Oligonucleotide
gauuuuguacgacaaugcu

SEQ ID NO: 5285 - RNA, 19 nt, Artificial Sequence
  Synthetic Oligonucleotide
gauuucgugcgacaaugcu

SEQ ID NO: 5286 - RNA, 19 nt, Artificial Sequence
  Synthetic Oligonucleotide
gaucuugugcgacaaugcu

SEQ ID NO: 5287 - RNA, 19 nt, Artificial Sequence
  Synthetic Oligonucleotide
gaauuugugcgacaaugcu

SEQ ID NO: 5288 - RNA, 19 nt, Artificial Sequence
  Synthetic Oligonucleotide
gacuuugugcgacaaugcu

SEQ ID NO: 5289 - RNA, 19 nt, Artificial Sequence
  Synthetic Oligonucleotide
gauuuugugcgacgcugcu

SEQ ID NO: 5290 - RNA, 19 nt, Artificial Sequence
  Synthetic Oligonucleotide
gauuuuguacggcaaugcu

SEQ ID NO: 5291 - RNA, 19 nt, Artificial Sequence
  Synthetic Oligonucleotide
gacuuugugcgacagugcu

SEQ ID NO: 5292 - RNA, 19 nt, Artificial Sequence
  Synthetic Oligonucleotide
gacuuugugcggcaaugcu

SEQ ID NO: 5293 - RNA, 19 nt, Artificial Sequence
  Synthetic Oligonucleotide
gacugugugcgacaaugcu

SEQ ID NO: 5294 - RNA, 19 nt, Artificial Sequence
  Synthetic Oligonucleotide
gauuuugagggacaauggu

SEQ ID NO: 5295 - RNA, 19 nt, Artificial Sequence
  Synthetic Oligonucleotide
auuuugugcgacaauguuu

SEQ ID NO: 5296 - RNA, 19 nt, Artificial Sequence
  Synthetic Oligonucleotide
auuuugugcgacagugcuu

SEQ ID NO: 5297 - RNA, 19 nt, Artificial Sequence
  Synthetic Oligonucleotide
auuuugugcggcaaugcuu

SEQ ID NO: 5298 - RNA, 19 nt, Artificial Sequence
  Synthetic Oligonucleotide
auuuugugagacaaugcuu

SEQ ID NO: 5299 - RNA, 19 nt, Artificial Sequence
  Synthetic Oligonucleotide
auuuugugggacaaugcuu

SEQ ID NO: 5300 - RNA, 19 nt, Artificial Sequence
  Synthetic Oligonucleotide
auuuuguacgacaaugcuu

SEQ ID NO: 5301 - RNA, 19 nt, Artificial Sequence
  Synthetic Oligonucleotide
auuucgugcgacaaugcuu

SEQ ID NO: 5302 - RNA, 19 nt, Artificial Sequence
  Synthetic Oligonucleotide
aucuugugcgacaaugcuu

SEQ ID NO: 5303 - RNA, 19 nt, Artificial Sequence
  Synthetic Oligonucleotide
aauuugugcgacaaugcuu

SEQ ID NO: 5304 - RNA, 19 nt, Artificial Sequence
  Synthetic Oligonucleotide
acuuugugcgacaaugcuu

SEQ ID NO: 5305 - RNA, 19 nt, Artificial Sequence
  Synthetic Oligonucleotide
auuuugugcgacgcugcuu

SEQ ID NO: 5306 - RNA, 19 nt, Artificial Sequence
  Synthetic Oligonucleotide
auuuuguacggcaaugcuu

SEQ ID NO: 5307 - RNA, 19 nt, Artificial Sequence
  Synthetic Oligonucleotide
acuuugugcgacagugcuu

SEQ ID NO: 5308 - RNA, 19 nt, Artificial Sequence
  Synthetic Oligonucleotide
acuuugugcggcaaugcuu

SEQ ID NO: 5309 - RNA, 19 nt, Artificial Sequence
  Synthetic Oligonucleotide
acuuugugagacaaugcuu

SEQ ID NO: 5310 - RNA, 19 nt, Artificial Sequence
  Synthetic Oligonucleotide
acugugugcgacaaugcuu

SEQ ID NO: 5311 - RNA, 19 nt, Artificial Sequence
  Synthetic Oligonucleotide
auuuugagggacaaugguu

SEQ ID NO: 5312 - RNA, 19 nt, Artificial Sequence
  Synthetic Oligonucleotide
ggaagauuuugugcgacag

SEQ ID NO: 5313 - RNA, 19 nt, Artificial Sequence
  Synthetic Oligonucleotide
ggaagauuuugugcggcaa

SEQ ID NO: 5314 - RNA, 19 nt, Artificial Sequence
  Synthetic Oligonucleotide
ggaggauuuugugcgacaa

SEQ ID NO: 5315 - RNA, 19 nt, Artificial Sequence
  Synthetic Oligonucleotide
ggaagauuuugugagacaa

SEQ ID NO: 5316 - RNA, 19 nt, Artificial Sequence
  Synthetic Oligonucleotide
ggaagauuuugugggacaa

SEQ ID NO: 5317 - RNA, 19 nt, Artificial Sequence
  Synthetic Oligonucleotide
ggaagauuuuguacgacaa

SEQ ID NO: 5318 - RNA, 19 nt, Artificial Sequence
  Synthetic Oligonucleotide
ggaagauuucgugcgacaa

SEQ ID NO: 5319 - RNA, 19 nt, Artificial Sequence
  Synthetic Oligonucleotide
ggaagaucuugugcgacaa

SEQ ID NO: 5320 - RNA, 19 nt, Artificial Sequence
  Synthetic Oligonucleotide
ggaagaauuugugcgacaa

SEQ ID NO: 5321 - RNA, 19 nt, Artificial Sequence
  Synthetic Oligonucleotide
ggaagacuuugugcgacaa

SEQ ID NO: 5322 - RNA, 19 nt, Artificial Sequence
  Synthetic Oligonucleotide
gguagauuuugugcgacaa

SEQ ID NO: 5323 - RNA, 19 nt, Artificial Sequence
  Synthetic Oligonucleotide
ggaagauuuugugcgacgc

SEQ ID NO: 5324 - RNA, 19 nt, Artificial Sequence
  Synthetic Oligonucleotide
ggaagauuuuguacggcaa

SEQ ID NO: 5325 - RNA, 19 nt, Artificial Sequence
  Synthetic Oligonucleotide
ggaagacuuugugcgacag

SEQ ID NO: 5326 - RNA, 19 nt, Artificial Sequence
  Synthetic Oligonucleotide
ggaagacuuugugcggcaa

SEQ ID NO: 5327 - RNA, 19 nt, Artificial Sequence
  Synthetic Oligonucleotide
ggaagauuuugagggacaa

SEQ ID NO: 5328 - RNA, 19 nt, Artificial Sequence
  Synthetic Oligonucleotide
ggaagacugugugcgacaa

SEQ ID NO: 5329 - RNA, 19 nt, Artificial Sequence
  Synthetic Oligonucleotide
agaguuuuagagccuaugu

SEQ ID NO: 5330 - RNA, 19 nt, Artificial Sequence
  Synthetic Oligonucleotide
agaauuuuagaaccuaugu

SEQ ID NO: 5331 - RNA, 19 nt, Artificial Sequence
  Synthetic Oligonucleotide
agaauuuuaaagccuaugu

SEQ ID NO: 5332 - RNA, 19 nt, Artificial Sequence
  Synthetic Oligonucleotide
agaacuuuagagccuaugu

SEQ ID NO: 5333 - RNA, 19 nt, Artificial Sequence
  Synthetic Oligonucleotide
agauuuuuagagccuaugu

SEQ ID NO: 5334 - RNA, 19 nt, Artificial Sequence
  Synthetic Oligonucleotide
aaaauuuuagagccuaugu

SEQ ID NO: 5335 - RNA, 19 nt, Artificial Sequence
  Synthetic Oligonucleotide
agaacuuuagagcauaugu

SEQ ID NO: 5336 - RNA, 19 nt, Artificial Sequence
  Synthetic Oligonucleotide
aaaaauuuagagccuaugu

SEQ ID NO: 5337 - RNA, 19 nt, Artificial Sequence
  Synthetic Oligonucleotide
aaaacuuuagagccuaugu

SEQ ID NO: 5338 - RNA, 19 nt, Artificial Sequence
  Synthetic Oligonucleotide
aaaacuuuagaaccuaugu

SEQ ID NO: 5339 - RNA, 19 nt, Artificial Sequence
  Synthetic Oligonucleotide
aaaccuuuagagccuaugu

SEQ ID NO: 5340 - RNA, 19 nt, Artificial Sequence
  Synthetic Oligonucleotide
uuuugugcgacaaugcuuu

SEQ ID NO: 5341 - RNA, 19 nt, Artificial Sequence
  Synthetic Oligonucleotide
uuuugugcgacaauguuuc

SEQ ID NO: 5342 - RNA, 19 nt, Artificial Sequence
  Synthetic Oligonucleotide
uuuugugcgacagugcuuc

SEQ ID NO: 5343 - RNA, 19 nt, Artificial Sequence
  Synthetic Oligonucleotide
uuuugugcggcaaugcuuc

SEQ ID NO: 5344 - RNA, 19 nt, Artificial Sequence
  Synthetic Oligonucleotide
uuuugugagacaaugcuuc

SEQ ID NO: 5345 - RNA, 19 nt, Artificial Sequence
  Synthetic Oligonucleotide
uuuugugggacaaugcuuc

SEQ ID NO: 5346 - RNA, 19 nt, Artificial Sequence
  Synthetic Oligonucleotide
uuucgugcgacaaugcuuc

SEQ ID NO: 5347 - RNA, 19 nt, Artificial Sequence
  Synthetic Oligonucleotide
ucuugugcgacaaugcuuc

SEQ ID NO: 5348 - RNA, 19 nt, Artificial Sequence
  Synthetic Oligonucleotide
auuugugcgacaaugcuuc

SEQ ID NO: 5349 - RNA, 19 nt, Artificial Sequence
  Synthetic Oligonucleotide
cuuugugcgacaaugcuuc

SEQ ID NO: 5350 - RNA, 19 nt, Artificial Sequence
  Synthetic Oligonucleotide
uuuugugcgacgcugcuuc

SEQ ID NO: 5351 - RNA, 19 nt, Artificial Sequence
  Synthetic Oligonucleotide
uuuuguacgacaaugcuuu

SEQ ID NO: 5352 - RNA, 19 nt, Artificial Sequence
  Synthetic Oligonucleotide
uuuuguacggcaaugcuuc

SEQ ID NO: 5353 - RNA, 19 nt, Artificial Sequence
  Synthetic Oligonucleotide
cuuugugcgacagugcuuc

SEQ ID NO: 5354 - RNA, 19 nt, Artificial Sequence
  Synthetic Oligonucleotide
cuuugugcggcaaugcuuc

SEQ ID NO: 5355 - RNA, 19 nt, Artificial Sequence
  Synthetic Oligonucleotide
cuuugugagacaaugcuuc

SEQ ID NO: 5356 - RNA, 19 nt, Artificial Sequence
  Synthetic Oligonucleotide
cugugugcgacaaugcuuc

SEQ ID NO: 5357 - RNA, 19 nt, Artificial Sequence
  Synthetic Oligonucleotide
uuuugagggacaaugguuc

SEQ ID NO: 5358 - RNA, 19 nt, Artificial Sequence
  Synthetic Oligonucleotide
agauuuugugcgacaaugu

SEQ ID NO: 5359 - RNA, 19 nt, Artificial Sequence
  Synthetic Oligonucleotide
agauuuugugcgacagugc

SEQ ID NO: 5360 - RNA, 19 nt, Artificial Sequence
  Synthetic Oligonucleotide
agauuuugugcggcaaugc

SEQ ID NO: 5361 - RNA, 19 nt, Artificial Sequence
  Synthetic Oligonucleotide
ggauuuugugcgacaaugc

SEQ ID NO: 5362 - RNA, 19 nt, Artificial Sequence
  Synthetic Oligonucleotide
agauuuugugagacaaugc

SEQ ID NO: 5363 - RNA, 19 nt, Artificial Sequence
  Synthetic Oligonucleotide
agauuuugugggacaaugc

SEQ ID NO: 5364 - RNA, 19 nt, Artificial Sequence
  Synthetic Oligonucleotide
agauuuuguacgacaaugc

SEQ ID NO: 5365 - RNA, 19 nt, Artificial Sequence
  Synthetic Oligonucleotide
agauuucgugcgacaaugc

SEQ ID NO: 5366 - RNA, 19 nt, Artificial Sequence
  Synthetic Oligonucleotide
agaucuugugcgacaaugc

SEQ ID NO: 5367 - RNA, 19 nt, Artificial Sequence
  Synthetic Oligonucleotide
agaauuugugcgacaaugc

SEQ ID NO: 5368 - RNA, 19 nt, Artificial Sequence
  Synthetic Oligonucleotide
agacuuugugcgacaaugc

SEQ ID NO: 5369 - RNA, 19 nt, Artificial Sequence
  Synthetic Oligonucleotide
agauuuugugcgacgcugc

SEQ ID NO: 5370 - RNA, 19 nt, Artificial Sequence
  Synthetic Oligonucleotide
agauuuuguacggcaaugc

SEQ ID NO: 5371 - RNA, 19 nt, Artificial Sequence
  Synthetic Oligonucleotide
agacuuugugcgacagugc

SEQ ID NO: 5372 - RNA, 19 nt, Artificial Sequence
  Synthetic Oligonucleotide
agacuuugugcggcaaugc

SEQ ID NO: 5373 - RNA, 19 nt, Artificial Sequence
  Synthetic Oligonucleotide
agacugugugcgacaaugc

SEQ ID NO: 5374 - RNA, 19 nt, Artificial Sequence
  Synthetic Oligonucleotide
agauuuugagggacaaugg

SEQ ID NO: 5375 - RNA, 19 nt, Artificial Sequence
  Synthetic Oligonucleotide
gagaguuuuagagccuaug

SEQ ID NO: 5376 - RNA, 19 nt, Artificial Sequence
  Synthetic Oligonucleotide
gagaauuuuagaaccuaug

SEQ ID NO: 5377 - RNA, 19 nt, Artificial Sequence
  Synthetic Oligonucleotide
gagaauuuuaaagccuaug

SEQ ID NO: 5378 - RNA, 19 nt, Artificial Sequence
  Synthetic Oligonucleotide
gagaacuuuagagccuaug

SEQ ID NO: 5379 - RNA, 19 nt, Artificial Sequence
  Synthetic Oligonucleotide
gagauuuuuagagccuaug

SEQ ID NO: 5380 - RNA, 19 nt, Artificial Sequence
  Synthetic Oligonucleotide
gaaaauuuuagagccuaug

SEQ ID NO: 5381 - RNA, 19 nt, Artificial Sequence
  Synthetic Oligonucleotide
aagaauuuuagagccuaug

SEQ ID NO: 5382 - RNA, 19 nt, Artificial Sequence
  Synthetic Oligonucleotide
gagaacuuuagagcauaug

SEQ ID NO: 5383 - RNA, 19 nt, Artificial Sequence
  Synthetic Oligonucleotide
gaaaaauuuagagccuaug

SEQ ID NO: 5384 - RNA, 19 nt, Artificial Sequence
  Synthetic Oligonucleotide
gaaaacuuuagagccuaug

SEQ ID NO: 5385 - RNA, 19 nt, Artificial Sequence
  Synthetic Oligonucleotide
gaaaacuuuagaaccuaug

SEQ ID NO: 5386 - RNA, 19 nt, Artificial Sequence
  Synthetic Oligonucleotide
gaaaccuuuagagccuaug

SEQ ID NO: 5387 - RNA, 19 nt, Artificial Sequence
  Synthetic Oligonucleotide
gaguuuuagagccuaugug

SEQ ID NO: 5388 - RNA, 19 nt, Artificial Sequence
  Synthetic Oligonucleotide
gaauuuuagagccuaugua

SEQ ID NO: 5389 - RNA, 19 nt, Artificial Sequence
  Synthetic Oligonucleotide
gaauuuuagaaccuaugug

SEQ ID NO: 5390 - RNA, 19 nt, Artificial Sequence
  Synthetic Oligonucleotide
gaauuuuaaagccuaugug

SEQ ID NO: 5391 - RNA, 19 nt, Artificial Sequence
  Synthetic Oligonucleotide
gaacuuuagagccuaugug

SEQ ID NO: 5392 - RNA, 19 nt, Artificial Sequence
  Synthetic Oligonucleotide
gauuuuuagagccuaugug

SEQ ID NO: 5393 - RNA, 19 nt, Artificial Sequence
  Synthetic Oligonucleotide
aaauuuuagagccuaugug

SEQ ID NO: 5394 - RNA, 19 nt, Artificial Sequence
  Synthetic Oligonucleotide
gaacuuuagagcauaugug

SEQ ID NO: 5395 - RNA, 19 nt, Artificial Sequence
  Synthetic Oligonucleotide
aaaauuuagagccuaugug

SEQ ID NO: 5396 - RNA, 19 nt, Artificial Sequence
  Synthetic Oligonucleotide
aaacuuuagagccuaugug

SEQ ID NO: 5397 - RNA, 19 nt, Artificial Sequence
  Synthetic Oligonucleotide
aaacuuuagagccuaugua

SEQ ID NO: 5398 - RNA, 19 nt, Artificial Sequence
  Synthetic Oligonucleotide
aaacuuuagaaccuaugug

SEQ ID NO: 5399 - RNA, 19 nt, Artificial Sequence
  Synthetic Oligonucleotide
aaccuuuagagccuaugug

SEQ ID NO: 5400 - RNA, 19 nt, Artificial Sequence
  Synthetic Oligonucleotide
ugagaguuuuagagccuau

SEQ ID NO: 5401 - RNA, 19 nt, Artificial Sequence
  Synthetic Oligonucleotide
ugagaauuuuagaaccuau

SEQ ID NO: 5402 - RNA, 19 nt, Artificial Sequence
  Synthetic Oligonucleotide
ugagaauuuuaaagccuau

SEQ ID NO: 5403 - RNA, 19 nt, Artificial Sequence
  Synthetic Oligonucleotide
ugagaacuuuagagccuau

SEQ ID NO: 5404 - RNA, 19 nt, Artificial Sequence
  Synthetic Oligonucleotide
ugagauuuuuagagccuau

SEQ ID NO: 5405 - RNA, 19 nt, Artificial Sequence
  Synthetic Oligonucleotide
ugaaaauuuuagagccuau

SEQ ID NO: 5406 - RNA, 19 nt, Artificial Sequence
  Synthetic Oligonucleotide
uaagaauuuuagagccuau

SEQ ID NO: 5407 - RNA, 19 nt, Artificial Sequence
  Synthetic Oligonucleotide
agagaauuuuagagccuau

SEQ ID NO: 5408 - RNA, 19 nt, Artificial Sequence
  Synthetic Oligonucleotide
ugagaacuuuagagcauau

SEQ ID NO: 5409 - RNA, 19 nt, Artificial Sequence
  Synthetic Oligonucleotide
ugaaaaauuuagagccuau

SEQ ID NO: 5410 - RNA, 19 nt, Artificial Sequence
  Synthetic Oligonucleotide
ugaaaacuuuagagccuau

SEQ ID NO: 5411 - RNA, 19 nt, Artificial Sequence
  Synthetic Oligonucleotide
ugaaaacuuuagaaccuau

SEQ ID NO: 5412 - RNA, 19 nt, Artificial Sequence
  Synthetic Oligonucleotide
ugaaaccuuuagagccuau

SEQ ID NO: 5413 - RNA, 19 nt, Artificial Sequence
  Synthetic Oligonucleotide
uugagaguuuuagagccua

SEQ ID NO: 5414 - RNA, 19 nt, Artificial Sequence
  Synthetic Oligonucleotide
uugagaauuuuagaaccua

SEQ ID NO: 5415 - RNA, 19 nt, Artificial Sequence
  Synthetic Oligonucleotide
uugagaauuuuaaagccua

SEQ ID NO: 5416 - RNA, 19 nt, Artificial Sequence
  Synthetic Oligonucleotide
uugagaacuuuagagccua

SEQ ID NO: 5417 - RNA, 19 nt, Artificial Sequence
  Synthetic Oligonucleotide
uugagauuuuuagagccua

SEQ ID NO: 5418 - RNA, 19 nt, Artificial Sequence
  Synthetic Oligonucleotide
uugaaaauuuuagagccua

SEQ ID NO: 5419 - RNA, 19 nt, Artificial Sequence
  Synthetic Oligonucleotide
uuaagaauuuuagagccua

SEQ ID NO: 5420 - RNA, 19 nt, Artificial Sequence
  Synthetic Oligonucleotide
uagagaauuuuagagccua

SEQ ID NO: 5421 - RNA, 19 nt, Artificial Sequence
  Synthetic Oligonucleotide
uugagaacuuuagagcaua

SEQ ID NO: 5422 - RNA, 19 nt, Artificial Sequence
  Synthetic Oligonucleotide
uugaaaaauuuagagccua

SEQ ID NO: 5423 - RNA, 19 nt, Artificial Sequence
  Synthetic Oligonucleotide
uugaaaacuuuagagccua

SEQ ID NO: 5424 - RNA, 19 nt, Artificial Sequence
  Synthetic Oligonucleotide
uugaaaacuuuagaaccua

SEQ ID NO: 5425 - RNA, 19 nt, Artificial Sequence
  Synthetic Oligonucleotide
uugaaaccuuuagagccua

SEQ ID NO: 5426 - RNA, 19 nt, Artificial Sequence
  Synthetic Oligonucleotide
acaaacaaauuugcggcaa

SEQ ID NO: 5427 - RNA, 19 nt, Artificial Sequence
  Synthetic Oligonucleotide
acaaauaaauuugcagcaa

SEQ ID NO: 5428 - RNA, 19 nt, Artificial Sequence
  Synthetic Oligonucleotide
acgaacaaauuugcagcaa

SEQ ID NO: 5429 - RNA, 19 nt, Artificial Sequence
  Synthetic Oligonucleotide
acaaacaaauuugcugcaa

SEQ ID NO: 5430 - RNA, 19 nt, Artificial Sequence
  Synthetic Oligonucleotide
acaaacaaauucgcagcaa

SEQ ID NO: 5431 - RNA, 19 nt, Artificial Sequence
  Synthetic Oligonucleotide
acaaacaaacuugcagcaa

SEQ ID NO: 5432 - RNA, 19 nt, Artificial Sequence
  Synthetic Oligonucleotide
acuaacaaauuugcagcaa

SEQ ID NO: 5433 - RNA, 19 nt, Artificial Sequence
  Synthetic Oligonucleotide
acgaacaaauuugccgcaa

SEQ ID NO: 5434 - RNA, 19 nt, Artificial Sequence
  Synthetic Oligonucleotide
acgaacaaauuugcugcaa

SEQ ID NO: 5435 - RNA, 19 nt, Artificial Sequence
  Synthetic Oligonucleotide
acgaacaaguuugcugcaa

SEQ ID NO: 5436 - RNA, 19 nt, Artificial Sequence
  Synthetic Oligonucleotide
acaaacaaguucgcugcaa

SEQ ID NO: 5437 - RNA, 19 nt, Artificial Sequence
  Synthetic Oligonucleotide
acgaacaaauucgccgcaa

SEQ ID NO: 5438 - RNA, 19 nt, Artificial Sequence
  Synthetic Oligonucleotide
accaacaaauucgcugcaa

SEQ ID NO: 5439 - RNA, 19 nt, Artificial Sequence
  Synthetic Oligonucleotide
caaacaaauuugcggcaau

SEQ ID NO: 5440 - RNA, 19 nt, Artificial Sequence
  Synthetic Oligonucleotide
caaauaaauuugcagcaau

SEQ ID NO: 5441 - RNA, 19 nt, Artificial Sequence
  Synthetic Oligonucleotide
cgaacaaauuugcagcaau

SEQ ID NO: 5442 - RNA, 19 nt, Artificial Sequence
  Synthetic Oligonucleotide
caaacaaauuugcugcaau

SEQ ID NO: 5443 - RNA, 19 nt, Artificial Sequence
  Synthetic Oligonucleotide
caaacaaauucgcagcaau

SEQ ID NO: 5444 - RNA, 19 nt, Artificial Sequence
  Synthetic Oligonucleotide
caaacaaacuugcagcaau

SEQ ID NO: 5445 - RNA, 19 nt, Artificial Sequence
  Synthetic Oligonucleotide
cuaacaaauuugcagcaau

SEQ ID NO: 5446 - RNA, 19 nt, Artificial Sequence
  Synthetic Oligonucleotide
cgaacaaauuugccgcaau

SEQ ID NO: 5447 - RNA, 19 nt, Artificial Sequence
  Synthetic Oligonucleotide
cgaacaaauuugcugcaau

SEQ ID NO: 5448 - RNA, 19 nt, Artificial Sequence
  Synthetic Oligonucleotide
cgaacaaguuugcugcaau

SEQ ID NO: 5449 - RNA, 19 nt, Artificial Sequence
  Synthetic Oligonucleotide
caaacaaguucgcugcaau

SEQ ID NO: 5450 - RNA, 19 nt, Artificial Sequence
  Synthetic Oligonucleotide
cgaacaaauucgccgcaau

SEQ ID NO: 5451 - RNA, 19 nt, Artificial Sequence
  Synthetic Oligonucleotide
ccaacaaauucgcugcaau

SEQ ID NO: 5452 - RNA, 19 nt, Artificial Sequence
  Synthetic Oligonucleotide
guauucggauuuucauuuc

SEQ ID NO: 5453 - RNA, 19 nt, Artificial Sequence
  Synthetic Oligonucleotide
guauucagauuuucacuuc

SEQ ID NO: 5454 - RNA, 19 nt, Artificial Sequence
  Synthetic Oligonucleotide
guauucagauuuccauuuc

SEQ ID NO: 5455 - RNA, 19 nt, Artificial Sequence
  Synthetic Oligonucleotide
guauucagacuuucauuuc

SEQ ID NO: 5456 - RNA, 19 nt, Artificial Sequence
  Synthetic Oligonucleotide
guacucagauuuucauuuc

SEQ ID NO: 5457 - RNA, 19 nt, Artificial Sequence
  Synthetic Oligonucleotide
guauucggauuuccauuuc

SEQ ID NO: 5458 - RNA, 19 nt, Artificial Sequence
  Synthetic Oligonucleotide
guauucggauuuucacuuu

SEQ ID NO: 5459 - RNA, 19 nt, Artificial Sequence
  Synthetic Oligonucleotide
guauucagauuuccacuuc

SEQ ID NO: 5460 - RNA, 19 nt, Artificial Sequence
  Synthetic Oligonucleotide
guauucagacuuccauuuc

SEQ ID NO: 5461 - RNA, 19 nt, Artificial Sequence
  Synthetic Oligonucleotide
guauucagacuuccauuuu

SEQ ID NO: 5462 - RNA, 19 nt, Artificial Sequence
  Synthetic Oligonucleotide
guauucggauuuccacuuc

SEQ ID NO: 5463 - RNA, 19 nt, Artificial Sequence
  Synthetic Oligonucleotide
uauucggauuuucauuuca

SEQ ID NO: 5464 - RNA, 19 nt, Artificial Sequence
  Synthetic Oligonucleotide
uauucagauuuucacuuca

SEQ ID NO: 5465 - RNA, 19 nt, Artificial Sequence
  Synthetic Oligonucleotide
uauucagauuuccauuuca

SEQ ID NO: 5466 - RNA, 19 nt, Artificial Sequence
  Synthetic Oligonucleotide
uauucagacuuucauuuca

SEQ ID NO: 5467 - RNA, 19 nt, Artificial Sequence
  Synthetic Oligonucleotide
uacucagauuuucauuuca

SEQ ID NO: 5468 - RNA, 19 nt, Artificial Sequence
  Synthetic Oligonucleotide
uauucggauuuccauuuca

SEQ ID NO: 5469 - RNA, 19 nt, Artificial Sequence
  Synthetic Oligonucleotide
uauucggauuuucacuuua

SEQ ID NO: 5470 - RNA, 19 nt, Artificial Sequence
  Synthetic Oligonucleotide
uauucagauuuccacuuca

SEQ ID NO: 5471 - RNA, 19 nt, Artificial Sequence
  Synthetic Oligonucleotide
uauucagacuuccauuuca

SEQ ID NO: 5472 - RNA, 19 nt, Artificial Sequence
  Synthetic Oligonucleotide
uauucagacuuccauuuua

SEQ ID NO: 5473 - RNA, 19 nt, Artificial Sequence
  Synthetic Oligonucleotide
uauucggauuuccacuuca

SEQ ID NO: 5474 - RNA, 19 nt, Artificial Sequence
  Synthetic Oligonucleotide
uguauucggauuuucauuu

SEQ ID NO: 5475 - RNA, 19 nt, Artificial Sequence
  Synthetic Oligonucleotide
uguauucagauuuucacuu

SEQ ID NO: 5476 - RNA, 19 nt, Artificial Sequence
  Synthetic Oligonucleotide
uguauucagauuuccauuu

SEQ ID NO: 5477 - RNA, 19 nt, Artificial Sequence
  Synthetic Oligonucleotide
uguauucagacuuucauuu

SEQ ID NO: 5478 - RNA, 19 nt, Artificial Sequence
  Synthetic Oligonucleotide
uguacucagauuuucauuu

SEQ ID NO: 5479 - RNA, 19 nt, Artificial Sequence
  Synthetic Oligonucleotide
uguauucggauuuucacuu

SEQ ID NO: 5480 - RNA, 19 nt, Artificial Sequence
  Synthetic Oligonucleotide
uguauucggauuuccauuu

SEQ ID NO: 5481 - RNA, 19 nt, Artificial Sequence
  Synthetic Oligonucleotide
uguauucagauuuccacuu

SEQ ID NO: 5482 - RNA, 19 nt, Artificial Sequence
  Synthetic Oligonucleotide
uguauucagacuuccauuu

SEQ ID NO: 5483 - RNA, 19 nt, Artificial Sequence
  Synthetic Oligonucleotide
uguauucggauuuccacuu

SEQ ID NO: 5484 - RNA, 19 nt, Artificial Sequence
  Synthetic Oligonucleotide
uguauucggacuuucacuu

SEQ ID NO: 5485 - RNA, 19 nt, Artificial Sequence
  Synthetic Oligonucleotide
auucggauuuucauuucau

SEQ ID NO: 5486 - RNA, 19 nt, Artificial Sequence
  Synthetic Oligonucleotide
auucagauuuucacuucau

SEQ ID NO: 5487 - RNA, 19 nt, Artificial Sequence
  Synthetic Oligonucleotide
auucagauuuccauuucau

SEQ ID NO: 5488 - RNA, 19 nt, Artificial Sequence
  Synthetic Oligonucleotide
auucagacuuucauuucau

SEQ ID NO: 5489 - RNA, 19 nt, Artificial Sequence
  Synthetic Oligonucleotide
acucagauuuucauuucau

SEQ ID NO: 5490 - RNA, 19 nt, Artificial Sequence
  Synthetic Oligonucleotide
auucggauuuccauuucau

SEQ ID NO: 5491 - RNA, 19 nt, Artificial Sequence
  Synthetic Oligonucleotide
auucggauuuucacuuuau

SEQ ID NO: 5492 - RNA, 19 nt, Artificial Sequence
  Synthetic Oligonucleotide
auucagauuuccacuucau

SEQ ID NO: 5493 - RNA, 19 nt, Artificial Sequence
  Synthetic Oligonucleotide
auucagacuuccauuucau

SEQ ID NO: 5494 - RNA, 19 nt, Artificial Sequence
  Synthetic Oligonucleotide
auucagacuuccauuuuau

SEQ ID NO: 5495 - RNA, 19 nt, Artificial Sequence
  Synthetic Oligonucleotide
auucggauuuccacuucau

SEQ ID NO: 5496 - RNA, 19 nt, Artificial Sequence
  Synthetic Oligonucleotide
auguauucggauuuucauu

SEQ ID NO: 5497 - RNA, 19 nt, Artificial Sequence
  Synthetic Oligonucleotide
auguauucagauuuucacu

SEQ ID NO: 5498 - RNA, 19 nt, Artificial Sequence
  Synthetic Oligonucleotide
auguauucagauuuccauu

SEQ ID NO: 5499 - RNA, 19 nt, Artificial Sequence
  Synthetic Oligonucleotide
auguauucagacuuucauu

SEQ ID NO: 5500 - RNA, 19 nt, Artificial Sequence
  Synthetic Oligonucleotide
auguacucagauuuucauu

SEQ ID NO: 5501 - RNA, 19 nt, Artificial Sequence
  Synthetic Oligonucleotide
auguauucggauuuucacu

SEQ ID NO: 5502 - RNA, 19 nt, Artificial Sequence
  Synthetic Oligonucleotide
auguauucggauuuccauu

SEQ ID NO: 5503 - RNA, 19 nt, Artificial Sequence
  Synthetic Oligonucleotide
auguauucagauuuccacu

SEQ ID NO: 5504 - RNA, 19 nt, Artificial Sequence
  Synthetic Oligonucleotide
auguauucagacuuccauu

SEQ ID NO: 5505 - RNA, 19 nt, Artificial Sequence
  Synthetic Oligonucleotide
auguauucggauuuccacu

SEQ ID NO: 5506 - RNA, 19 nt, Artificial Sequence
  Synthetic Oligonucleotide
auguauucggacuuucacu

SEQ ID NO: 5507 - RNA, 19 nt, Artificial Sequence
  Synthetic Oligonucleotide
aaacaaauuugcggcaaua

SEQ ID NO: 5508 - RNA, 19 nt, Artificial Sequence
  Synthetic Oligonucleotide
aaauaaauuugcagcaaua

SEQ ID NO: 5509 - RNA, 19 nt, Artificial Sequence
  Synthetic Oligonucleotide
gaacaaauuugcagcaaua

SEQ ID NO: 5510 - RNA, 19 nt, Artificial Sequence
  Synthetic Oligonucleotide
aaacaaauuugcugcaaua

SEQ ID NO: 5511 - RNA, 19 nt, Artificial Sequence
  Synthetic Oligonucleotide
aaacaaauucgcagcaaua

SEQ ID NO: 5512 - RNA, 19 nt, Artificial Sequence
  Synthetic Oligonucleotide
aaacaaacuugcagcaaua

SEQ ID NO: 5513 - RNA, 19 nt, Artificial Sequence
  Synthetic Oligonucleotide
uaacaaauuugcagcaaua

SEQ ID NO: 5514 - RNA, 19 nt, Artificial Sequence
  Synthetic Oligonucleotide
gaacaaauuugccgcaaua

SEQ ID NO: 5515 - RNA, 19 nt, Artificial Sequence
  Synthetic Oligonucleotide
gaacaaauuugcugcaaua

SEQ ID NO: 5516 - RNA, 19 nt, Artificial Sequence
  Synthetic Oligonucleotide
gaacaaguuugcugcaaua

SEQ ID NO: 5517 - RNA, 19 nt, Artificial Sequence
  Synthetic Oligonucleotide
aaacaaguucgcugcaaua

SEQ ID NO: 5518 - RNA, 19 nt, Artificial Sequence
  Synthetic Oligonucleotide
gaacaaauucgccgcaaua

SEQ ID NO: 5519 - RNA, 19 nt, Artificial Sequence
  Synthetic Oligonucleotide
caacaaauucgcugcaaua

SEQ ID NO: 5520 - RNA, 19 nt, Artificial Sequence
  Synthetic Oligonucleotide
guucaggcucuuagggaua

SEQ ID NO: 5521 - RNA, 19 nt, Artificial Sequence
  Synthetic Oligonucleotide
guucaggcuuuuagggaca

SEQ ID NO: 5522 - RNA, 19 nt, Artificial Sequence
  Synthetic Oligonucleotide
guucaggcucuuagagaca

SEQ ID NO: 5523 - RNA, 19 nt, Artificial Sequence
  Synthetic Oligonucleotide
guucaggcucuuaaggaca

SEQ ID NO: 5524 - RNA, 19 nt, Artificial Sequence
  Synthetic Oligonucleotide
guucaggcucuucgggaca

SEQ ID NO: 5525 - RNA, 19 nt, Artificial Sequence
  Synthetic Oligonucleotide
guucaggcucucagggaca

SEQ ID NO: 5526 - RNA, 19 nt, Artificial Sequence
  Synthetic Oligonucleotide
guucaggcacuuagggaca

SEQ ID NO: 5527 - RNA, 19 nt, Artificial Sequence
  Synthetic Oligonucleotide
guucaggcccuuagggaca

SEQ ID NO: 5528 - RNA, 19 nt, Artificial Sequence
  Synthetic Oligonucleotide
guucagucucuuagggaca

SEQ ID NO: 5529 - RNA, 19 nt, Artificial Sequence
  Synthetic Oligonucleotide
guccaggcucuuagggaca

SEQ ID NO: 5530 - RNA, 19 nt, Artificial Sequence
  Synthetic Oligonucleotide
auucaggcucuuagggaca

SEQ ID NO: 5531 - RNA, 19 nt, Artificial Sequence
  Synthetic Oligonucleotide
guucaggcucuuaaggaaa

SEQ ID NO: 5532 - RNA, 19 nt, Artificial Sequence
  Synthetic Oligonucleotide
guucaggcacucagggaca

SEQ ID NO: 5533 - RNA, 19 nt, Artificial Sequence
  Synthetic Oligonucleotide
guucaagcacuuagggaca

SEQ ID NO: 5534 - RNA, 19 nt, Artificial Sequence
  Synthetic Oligonucleotide
gcucaggcacuuagggaca

SEQ ID NO: 5535 - RNA, 19 nt, Artificial Sequence
  Synthetic Oligonucleotide
uucaggcucuuagggacag

SEQ ID NO: 5536 - RNA, 19 nt, Artificial Sequence
  Synthetic Oligonucleotide
uucaggcucuuagggauaa

SEQ ID NO: 5537 - RNA, 19 nt, Artificial Sequence
  Synthetic Oligonucleotide
uucaggcuuuuagggacaa

SEQ ID NO: 5538 - RNA, 19 nt, Artificial Sequence
  Synthetic Oligonucleotide
uucaggcucuuagagacaa

SEQ ID NO: 5539 - RNA, 19 nt, Artificial Sequence
  Synthetic Oligonucleotide
uucaggcucuuaaggacaa

SEQ ID NO: 5540 - RNA, 19 nt, Artificial Sequence
  Synthetic Oligonucleotide
uucaggcucuucgggacaa

SEQ ID NO: 5541 - RNA, 19 nt, Artificial Sequence
  Synthetic Oligonucleotide
uucaggcucucagggacaa

SEQ ID NO: 5542 - RNA, 19 nt, Artificial Sequence
  Synthetic Oligonucleotide
uucaggcacuuagggacaa

SEQ ID NO: 5543 - RNA, 19 nt, Artificial Sequence
  Synthetic Oligonucleotide
uucaggcccuuagggacaa

SEQ ID NO: 5544 - RNA, 19 nt, Artificial Sequence
  Synthetic Oligonucleotide
uucagucucuuagggacaa

SEQ ID NO: 5545 - RNA, 19 nt, Artificial Sequence
  Synthetic Oligonucleotide
uccaggcucuuagggacaa

SEQ ID NO: 5546 - RNA, 19 nt, Artificial Sequence
  Synthetic Oligonucleotide
uucaggcucuuaaggaaaa

SEQ ID NO: 5547 - RNA, 19 nt, Artificial Sequence
  Synthetic Oligonucleotide
uucaggcacucagggacaa

SEQ ID NO: 5548 - RNA, 19 nt, Artificial Sequence
  Synthetic Oligonucleotide
uucaagcacuuagggacaa

SEQ ID NO: 5549 - RNA, 19 nt, Artificial Sequence
  Synthetic Oligonucleotide
cucaggcacuuagggacaa

SEQ ID NO: 5550 - RNA, 19 nt, Artificial Sequence
  Synthetic Oligonucleotide
gauuuucauuucauuaaug

SEQ ID NO: 5551 - RNA, 19 nt, Artificial Sequence
  Synthetic Oligonucleotide
gauuuucauuucaucaacg

SEQ ID NO: 5552 - RNA, 19 nt, Artificial Sequence
  Synthetic Oligonucleotide
gauuuucacuucaucaaug

SEQ ID NO: 5553 - RNA, 19 nt, Artificial Sequence
  Synthetic Oligonucleotide
gauuuccauuucaucaaug

SEQ ID NO: 5554 - RNA, 19 nt, Artificial Sequence
  Synthetic Oligonucleotide
gacuuucauuucaucaaug

SEQ ID NO: 5555 - RNA, 19 nt, Artificial Sequence
  Synthetic Oligonucleotide
gauuuucacuucaucgaug

SEQ ID NO: 5556 - RNA, 19 nt, Artificial Sequence
  Synthetic Oligonucleotide
gauuuccacuucaucaaug

SEQ ID NO: 5557 - RNA, 19 nt, Artificial Sequence
  Synthetic Oligonucleotide
gauuuccacuucaucgaug

SEQ ID NO: 5558 - RNA, 19 nt, Artificial Sequence
  Synthetic Oligonucleotide
cauguauucggauuuucau

SEQ ID NO: 5559 - RNA, 19 nt, Artificial Sequence
  Synthetic Oligonucleotide
uauguauucagauuuucau

SEQ ID NO: 5560 - RNA, 19 nt, Artificial Sequence
  Synthetic Oligonucleotide
cauguauucagauuuucac

SEQ ID NO: 5561 - RNA, 19 nt, Artificial Sequence
  Synthetic Oligonucleotide
cauguauucagauuuccau

SEQ ID NO: 5562 - RNA, 19 nt, Artificial Sequence
  Synthetic Oligonucleotide
cauguauucagacuuucau

SEQ ID NO: 5563 - RNA, 19 nt, Artificial Sequence
  Synthetic Oligonucleotide
cauguacucagauuuucau

SEQ ID NO: 5564 - RNA, 19 nt, Artificial Sequence
  Synthetic Oligonucleotide
aauguauucagauuuucau

SEQ ID NO: 5565 - RNA, 19 nt, Artificial Sequence
  Synthetic Oligonucleotide
cauguauucggauuuucac

SEQ ID NO: 5566 - RNA, 19 nt, Artificial Sequence
  Synthetic Oligonucleotide
cauguauucggauuuccau

SEQ ID NO: 5567 - RNA, 19 nt, Artificial Sequence
  Synthetic Oligonucleotide
cauguauucagauuuccac

SEQ ID NO: 5568 - RNA, 19 nt, Artificial Sequence
  Synthetic Oligonucleotide
cauguauucagacuuccau

SEQ ID NO: 5569 - RNA, 19 nt, Artificial Sequence
  Synthetic Oligonucleotide
cauguauucggauuuccac

SEQ ID NO: 5570 - RNA, 19 nt, Artificial Sequence
  Synthetic Oligonucleotide
cauguauucggacuuucac

SEQ ID NO: 5571 - RNA, 19 nt, Artificial Sequence
  Synthetic Oligonucleotide
auuuucauuucauuaauga

SEQ ID NO: 5572 - RNA, 19 nt, Artificial Sequence
  Synthetic Oligonucleotide
auuuucauuucaucaacga

SEQ ID NO: 5573 - RNA, 19 nt, Artificial Sequence
  Synthetic Oligonucleotide
auuuucacuucaucaauga

SEQ ID NO: 5574 - RNA, 19 nt, Artificial Sequence
  Synthetic Oligonucleotide
auuuccauuucaucaauga

SEQ ID NO: 5575 - RNA, 19 nt, Artificial Sequence
  Synthetic Oligonucleotide
acuuucauuucaucaauga

SEQ ID NO: 5576 - RNA, 19 nt, Artificial Sequence
  Synthetic Oligonucleotide
auuuucacuucaucgauga

SEQ ID NO: 5577 - RNA, 19 nt, Artificial Sequence
  Synthetic Oligonucleotide
auuuccacuucaucaauga

SEQ ID NO: 5578 - RNA, 19 nt, Artificial Sequence
  Synthetic Oligonucleotide
auuuccacuucaucgauga

SEQ ID NO: 5579 - RNA, 19 nt, Artificial Sequence
  Synthetic Oligonucleotide
ucagauuuucauuucauua

SEQ ID NO: 5580 - RNA, 19 nt, Artificial Sequence
  Synthetic Oligonucleotide
ucggauuuucauuucauca

SEQ ID NO: 5581 - RNA, 19 nt, Artificial Sequence
  Synthetic Oligonucleotide
ucagauuuucacuucauca

SEQ ID NO: 5582 - RNA, 19 nt, Artificial Sequence
  Synthetic Oligonucleotide
ucagauuuccauuucauca

SEQ ID NO: 5583 - RNA, 19 nt, Artificial Sequence
  Synthetic Oligonucleotide
ucagacuuucauuucauca

SEQ ID NO: 5584 - RNA, 19 nt, Artificial Sequence
  Synthetic Oligonucleotide
ucagauuuucacuucaucg

SEQ ID NO: 5585 - RNA, 19 nt, Artificial Sequence
  Synthetic Oligonucleotide
ucagauuuccacuucauca

SEQ ID NO: 5586 - RNA, 19 nt, Artificial Sequence
  Synthetic Oligonucleotide
ucggauuuccacuucauca

SEQ ID NO: 5587 - RNA, 19 nt, Artificial Sequence
  Synthetic Oligonucleotide
gaaacaaacaaauuugcgg

SEQ ID NO: 5588 - RNA, 19 nt, Artificial Sequence
  Synthetic Oligonucleotide
gaaacaaauaaauuugcag

SEQ ID NO: 5589 - RNA, 19 nt, Artificial Sequence
  Synthetic Oligonucleotide
gaaacgaacaaauuugcag

SEQ ID NO: 5590 - RNA, 19 nt, Artificial Sequence
  Synthetic Oligonucleotide
gagacaaacaaauuugcag

SEQ ID NO: 5591 - RNA, 19 nt, Artificial Sequence
  Synthetic Oligonucleotide
gaaacaaacaaauuugcug

SEQ ID NO: 5592 - RNA, 19 nt, Artificial Sequence
  Synthetic Oligonucleotide
gaaacaaacaaauucgcag

SEQ ID NO: 5593 - RNA, 19 nt, Artificial Sequence
  Synthetic Oligonucleotide
gaaacaaacaaacuugcag

SEQ ID NO: 5594 - RNA, 19 nt, Artificial Sequence
  Synthetic Oligonucleotide
gaaacuaacaaauuugcag

SEQ ID NO: 5595 - RNA, 19 nt, Artificial Sequence
  Synthetic Oligonucleotide
gaaacgaacaaauuugccg

SEQ ID NO: 5596 - RNA, 19 nt, Artificial Sequence
  Synthetic Oligonucleotide
gaaacgaacaaauuugcug

SEQ ID NO: 5597 - RNA, 19 nt, Artificial Sequence
  Synthetic Oligonucleotide
gagacaaacaaauuugcug

SEQ ID NO: 5598 - RNA, 19 nt, Artificial Sequence
  Synthetic Oligonucleotide
gaaacgaacaaguuugcug

SEQ ID NO: 5599 - RNA, 19 nt, Artificial Sequence
  Synthetic Oligonucleotide
gaaacaaacaaguucgcug

SEQ ID NO: 5600 - RNA, 19 nt, Artificial Sequence
  Synthetic Oligonucleotide
gaaacgaacaaauucgccg

SEQ ID NO: 5601 - RNA, 19 nt, Artificial Sequence
  Synthetic Oligonucleotide
gaaaccaacaaauucgcug

SEQ ID NO: 5602 - RNA, 19 nt, Artificial Sequence
  Synthetic Oligonucleotide
aaacaaacaaauuugcggc

SEQ ID NO: 5603 - RNA, 19 nt, Artificial Sequence
  Synthetic Oligonucleotide
aaacaaauaaauuugcagc

SEQ ID NO: 5604 - RNA, 19 nt, Artificial Sequence
  Synthetic Oligonucleotide
aaacgaacaaauuugcagc

SEQ ID NO: 5605 - RNA, 19 nt, Artificial Sequence
  Synthetic Oligonucleotide
agacaaacaaauuugcagc

SEQ ID NO: 5606 - RNA, 19 nt, Artificial Sequence
  Synthetic Oligonucleotide
aaacaaacaaauuugcugc

SEQ ID NO: 5607 - RNA, 19 nt, Artificial Sequence
  Synthetic Oligonucleotide
aaacaaacaaauucgcagc

SEQ ID NO: 5608 - RNA, 19 nt, Artificial Sequence
  Synthetic Oligonucleotide
aaacaaacaaacuugcagc

SEQ ID NO: 5609 - RNA, 19 nt, Artificial Sequence
  Synthetic Oligonucleotide
aaacuaacaaauuugcagc

SEQ ID NO: 5610 - RNA, 19 nt, Artificial Sequence
  Synthetic Oligonucleotide
aaacgaacaaauuugccgc

SEQ ID NO: 5611 - RNA, 19 nt, Artificial Sequence
  Synthetic Oligonucleotide
aaacgaacaaauuugcugc

SEQ ID NO: 5612 - RNA, 19 nt, Artificial Sequence
  Synthetic Oligonucleotide
agacaaacaaauuugcugc

SEQ ID NO: 5613 - RNA, 19 nt, Artificial Sequence
  Synthetic Oligonucleotide
aaacgaacaaguuugcugc

SEQ ID NO: 5614 - RNA, 19 nt, Artificial Sequence
  Synthetic Oligonucleotide
aaacaaacaaguucgcugc

SEQ ID NO: 5615 - RNA, 19 nt, Artificial Sequence
  Synthetic Oligonucleotide
aaacgaacaaauucgccgc

SEQ ID NO: 5616 - RNA, 19 nt, Artificial Sequence
  Synthetic Oligonucleotide
aaaccaacaaauucgcugc

SEQ ID NO: 5617 - RNA, 19 nt, Artificial Sequence
  Synthetic Oligonucleotide
cagauuuucauuucauuaa

SEQ ID NO: 5618 - RNA, 19 nt, Artificial Sequence
  Synthetic Oligonucleotide
cggauuuucauuucaucaa

SEQ ID NO: 5619 - RNA, 19 nt, Artificial Sequence
  Synthetic Oligonucleotide
cagauuuucacuucaucaa

SEQ ID NO: 5620 - RNA, 19 nt, Artificial Sequence
  Synthetic Oligonucleotide
cagauuuccauuucaucaa

SEQ ID NO: 5621 - RNA, 19 nt, Artificial Sequence
  Synthetic Oligonucleotide
cagacuuucauuucaucaa

SEQ ID NO: 5622 - RNA, 19 nt, Artificial Sequence
  Synthetic Oligonucleotide
cagauuuucacuucaucga

SEQ ID NO: 5623 - RNA, 19 nt, Artificial Sequence
  Synthetic Oligonucleotide
cagauuuccacuucaucaa

SEQ ID NO: 5624 - RNA, 19 nt, Artificial Sequence
  Synthetic Oligonucleotide
cggauuuccacuucaucaa

SEQ ID NO: 5625 - RNA, 19 nt, Artificial Sequence
  Synthetic Oligonucleotide
aacaaacaaauuugcggca

SEQ ID NO: 5626 - RNA, 19 nt, Artificial Sequence
  Synthetic Oligonucleotide
aacaaauaaauuugcagca

SEQ ID NO: 5627 - RNA, 19 nt, Artificial Sequence
  Synthetic Oligonucleotide
aacgaacaaauuugcagca

SEQ ID NO: 5628 - RNA, 19 nt, Artificial Sequence
  Synthetic Oligonucleotide
gacaaacaaauuugcagca

SEQ ID NO: 5629 - RNA, 19 nt, Artificial Sequence
  Synthetic Oligonucleotide
aacaaacaaauuugcugca

SEQ ID NO: 5630 - RNA, 19 nt, Artificial Sequence
  Synthetic Oligonucleotide
aacaaacaaauucgcagca

SEQ ID NO: 5631 - RNA, 19 nt, Artificial Sequence
  Synthetic Oligonucleotide
aacaaacaaacuugcagca

SEQ ID NO: 5632 - RNA, 19 nt, Artificial Sequence
  Synthetic Oligonucleotide
aacuaacaaauuugcagca

SEQ ID NO: 5633 - RNA, 19 nt, Artificial Sequence
  Synthetic Oligonucleotide
aacgaacaaauuugccgca

SEQ ID NO: 5634 - RNA, 19 nt, Artificial Sequence
  Synthetic Oligonucleotide
aacgaacaaauuugcugca

SEQ ID NO: 5635 - RNA, 19 nt, Artificial Sequence
  Synthetic Oligonucleotide
gacaaacaaauuugcugca

SEQ ID NO: 5636 - RNA, 19 nt, Artificial Sequence
  Synthetic Oligonucleotide
aacgaacaaguuugcugca

SEQ ID NO: 5637 - RNA, 19 nt, Artificial Sequence
  Synthetic Oligonucleotide
aacaaacaaguucgcugca

SEQ ID NO: 5638 - RNA, 19 nt, Artificial Sequence
  Synthetic Oligonucleotide
aacgaacaaauucgccgca

SEQ ID NO: 5639 - RNA, 19 nt, Artificial Sequence
  Synthetic Oligonucleotide
aaccaacaaauucgcugca

SEQ ID NO: 5640 - RNA, 19 nt, Artificial Sequence
  Synthetic Oligonucleotide
agauuuucauuucauuaau

SEQ ID NO: 5641 - RNA, 19 nt, Artificial Sequence
  Synthetic Oligonucleotide
ggauuuucauuucaucaau

SEQ ID NO: 5642 - RNA, 19 nt, Artificial Sequence
  Synthetic Oligonucleotide
agauuuucauuucaucaac

SEQ ID NO: 5643 - RNA, 19 nt, Artificial Sequence
  Synthetic Oligonucleotide
agauuuucacuucaucaau

SEQ ID NO: 5644 - RNA, 19 nt, Artificial Sequence
  Synthetic Oligonucleotide
agauuuccauuucaucaau

SEQ ID NO: 5645 - RNA, 19 nt, Artificial Sequence
  Synthetic Oligonucleotide
agacuuucauuucaucaau

SEQ ID NO: 5646 - RNA, 19 nt, Artificial Sequence
  Synthetic Oligonucleotide
agauuuucacuucaucgau

SEQ ID NO: 5647 - RNA, 19 nt, Artificial Sequence
  Synthetic Oligonucleotide
agauuuccacuucaucaau

SEQ ID NO: 5648 - RNA, 19 nt, Artificial Sequence
  Synthetic Oligonucleotide
ggauuuccacuucaucaau

SEQ ID NO: 5649 - RNA, 19 nt, Artificial Sequence
  Synthetic Oligonucleotide
uucagauuuucauuucauu

SEQ ID NO: 5650 - RNA, 19 nt, Artificial Sequence
  Synthetic Oligonucleotide
uucggauuuucauuucauc

SEQ ID NO: 5651 - RNA, 19 nt, Artificial Sequence
  Synthetic Oligonucleotide
uucagauuuucacuucauc

SEQ ID NO: 5652 - RNA, 19 nt, Artificial Sequence
  Synthetic Oligonucleotide
uucagauuuccauuucauc

SEQ ID NO: 5653 - RNA, 19 nt, Artificial Sequence
  Synthetic Oligonucleotide
uucagacuuucauuucauc

SEQ ID NO: 5654 - RNA, 19 nt, Artificial Sequence
  Synthetic Oligonucleotide
cucagauuuucauuucauc

SEQ ID NO: 5655 - RNA, 19 nt, Artificial Sequence
  Synthetic Oligonucleotide
uucggauuuccauuucauu

SEQ ID NO: 5656 - RNA, 19 nt, Artificial Sequence
  Synthetic Oligonucleotide
uucagauuuccacuucauc

SEQ ID NO: 5657 - RNA, 19 nt, Artificial Sequence
  Synthetic Oligonucleotide
uucagauuuccacuucauu

SEQ ID NO: 5658 - RNA, 19 nt, Artificial Sequence
  Synthetic Oligonucleotide
uucagacuuccauuucauu

SEQ ID NO: 5659 - RNA, 19 nt, Artificial Sequence
  Synthetic Oligonucleotide
uucggauuuccacuucauc

SEQ ID NO: 5660 - RNA, 19 nt, Artificial Sequence
  Synthetic Oligonucleotide
agccuauguggauggauuu

SEQ ID NO: 5661 - RNA, 19 nt, Artificial Sequence
  Synthetic Oligonucleotide
agccuauguggauggguuc

SEQ ID NO: 5662 - RNA, 19 nt, Artificial Sequence
  Synthetic Oligonucleotide
agccuauguggauggauac

SEQ ID NO: 5663 - RNA, 19 nt, Artificial Sequence
  Synthetic Oligonucleotide
agccuauguggauagauuc

SEQ ID NO: 5664 - RNA, 19 nt, Artificial Sequence
  Synthetic Oligonucleotide
agccuauguagauggauuc

SEQ ID NO: 5665 - RNA, 19 nt, Artificial Sequence
  Synthetic Oligonucleotide
agcauauguggauggauuc

SEQ ID NO: 5666 - RNA, 19 nt, Artificial Sequence
  Synthetic Oligonucleotide
aaccuauguggauggauuc

SEQ ID NO: 5667 - RNA, 19 nt, Artificial Sequence
  Synthetic Oligonucleotide
agccuauguagauggguuc

SEQ ID NO: 5668 - RNA, 19 nt, Artificial Sequence
  Synthetic Oligonucleotide
aaccuauguggauggauuu

SEQ ID NO: 5669 - RNA, 19 nt, Artificial Sequence
  Synthetic Oligonucleotide
cacauuuucucauuuacug

SEQ ID NO: 5670 - RNA, 19 nt, Artificial Sequence
  Synthetic Oligonucleotide
cacauuuucucguucacug

SEQ ID NO: 5671 - RNA, 19 nt, Artificial Sequence
  Synthetic Oligonucleotide
cacauuuuuucauucacug

SEQ ID NO: 5672 - RNA, 19 nt, Artificial Sequence
  Synthetic Oligonucleotide
cauauuuucucauucacug

SEQ ID NO: 5673 - RNA, 19 nt, Artificial Sequence
  Synthetic Oligonucleotide
cacauuuucucguucauug

SEQ ID NO: 5674 - RNA, 19 nt, Artificial Sequence
  Synthetic Oligonucleotide
cacauuuucucguuuacug

SEQ ID NO: 5675 - RNA, 19 nt, Artificial Sequence
  Synthetic Oligonucleotide
cauauuuuuucauucacug

SEQ ID NO: 5676 - RNA, 19 nt, Artificial Sequence
  Synthetic Oligonucleotide
cacauuuucucauucacua

SEQ ID NO: 5677 - RNA, 19 nt, Artificial Sequence
  Synthetic Oligonucleotide
cacauuuucucauucacag

SEQ ID NO: 5678 - RNA, 19 nt, Artificial Sequence
  Synthetic Oligonucleotide
cacauuuucucauucaccg

SEQ ID NO: 5679 - RNA, 19 nt, Artificial Sequence
  Synthetic Oligonucleotide
cacauuuucuccuucacug

SEQ ID NO: 5680 - RNA, 19 nt, Artificial Sequence
  Synthetic Oligonucleotide
cacauuuucucuuucacug

SEQ ID NO: 5681 - RNA, 19 nt, Artificial Sequence
  Synthetic Oligonucleotide
cacauauucucauucacug

SEQ ID NO: 5682 - RNA, 19 nt, Artificial Sequence
  Synthetic Oligonucleotide
cacaucuucucauucacug

SEQ ID NO: 5683 - RNA, 19 nt, Artificial Sequence
  Synthetic Oligonucleotide
cacaucuucucauuuacug

SEQ ID NO: 5684 - RNA, 19 nt, Artificial Sequence
  Synthetic Oligonucleotide
cacaucuucucguucacug

SEQ ID NO: 5685 - RNA, 19 nt, Artificial Sequence
  Synthetic Oligonucleotide
cacaucuuuucauucacug

SEQ ID NO: 5686 - RNA, 19 nt, Artificial Sequence
  Synthetic Oligonucleotide
cacauauucucauucacag

SEQ ID NO: 5687 - RNA, 19 nt, Artificial Sequence
  Synthetic Oligonucleotide
cacauauucucauucacgg

SEQ ID NO: 5688 - RNA, 19 nt, Artificial Sequence
  Synthetic Oligonucleotide
cacauauucucuuucacug

SEQ ID NO: 5689 - RNA, 19 nt, Artificial Sequence
  Synthetic Oligonucleotide
cacauauuuucauucacag

SEQ ID NO: 5690 - RNA, 19 nt, Artificial Sequence
  Synthetic Oligonucleotide
cacaucuucucuuuuacug

SEQ ID NO: 5691 - RNA, 19 nt, Artificial Sequence
  Synthetic Oligonucleotide
acauuuucucauuuacugg

SEQ ID NO: 5692 - RNA, 19 nt, Artificial Sequence
  Synthetic Oligonucleotide
acauuuucucguucacugg

SEQ ID NO: 5693 - RNA, 19 nt, Artificial Sequence
  Synthetic Oligonucleotide
acauuuuuucauucacugg

SEQ ID NO: 5694 - RNA, 19 nt, Artificial Sequence
  Synthetic Oligonucleotide
auauuuucucauucacugg

SEQ ID NO: 5695 - RNA, 19 nt, Artificial Sequence
  Synthetic Oligonucleotide
acauuuucucguucauugg

SEQ ID NO: 5696 - RNA, 19 nt, Artificial Sequence
  Synthetic Oligonucleotide
acauuuucucguuuacugg

SEQ ID NO: 5697 - RNA, 19 nt, Artificial Sequence
  Synthetic Oligonucleotide
auauuuuuucauucacugg

SEQ ID NO: 5698 - RNA, 19 nt, Artificial Sequence
  Synthetic Oligonucleotide
acauuuucucauucacuga

SEQ ID NO: 5699 - RNA, 19 nt, Artificial Sequence
  Synthetic Oligonucleotide
acauuuucucauucacuag

SEQ ID NO: 5700 - RNA, 19 nt, Artificial Sequence
  Synthetic Oligonucleotide
acauuuucucauucacagg

SEQ ID NO: 5701 - RNA, 19 nt, Artificial Sequence
  Synthetic Oligonucleotide
acauuuucucauucaccgg

SEQ ID NO: 5702 - RNA, 19 nt, Artificial Sequence
  Synthetic Oligonucleotide
acauuuucuccuucacugg

SEQ ID NO: 5703 - RNA, 19 nt, Artificial Sequence
  Synthetic Oligonucleotide
acauuuucucuuucacugg

SEQ ID NO: 5704 - RNA, 19 nt, Artificial Sequence
  Synthetic Oligonucleotide
acauauucucauucacugg

SEQ ID NO: 5705 - RNA, 19 nt, Artificial Sequence
  Synthetic Oligonucleotide
acaucuucucauucacugg

SEQ ID NO: 5706 - RNA, 19 nt, Artificial Sequence
  Synthetic Oligonucleotide
acaucuucucauuuacugg

SEQ ID NO: 5707 - RNA, 19 nt, Artificial Sequence
  Synthetic Oligonucleotide
acaucuucucguucacugg

SEQ ID NO: 5708 - RNA, 19 nt, Artificial Sequence
  Synthetic Oligonucleotide
acaucuuuucauucacugg

SEQ ID NO: 5709 - RNA, 19 nt, Artificial Sequence
  Synthetic Oligonucleotide
acauauucucauucacagg

SEQ ID NO: 5710 - RNA, 19 nt, Artificial Sequence
  Synthetic Oligonucleotide
acauauucucauucacggg

SEQ ID NO: 5711 - RNA, 19 nt, Artificial Sequence
  Synthetic Oligonucleotide
acauauucucuuucacugg

SEQ ID NO: 5712 - RNA, 19 nt, Artificial Sequence
  Synthetic Oligonucleotide
acauauuuucauucacagg

SEQ ID NO: 5713 - RNA, 19 nt, Artificial Sequence
  Synthetic Oligonucleotide
acaucuucucuuuuacugg

SEQ ID NO: 5714 - RNA, 19 nt, Artificial Sequence
  Synthetic Oligonucleotide
acauucuuuggauggaagg

SEQ ID NO: 5715 - RNA, 19 nt, Artificial Sequence
  Synthetic Oligonucleotide
acauucuuuggguggaaag

SEQ ID NO: 5716 - RNA, 19 nt, Artificial Sequence
  Synthetic Oligonucleotide
acauuuuuuggauggaaag

SEQ ID NO: 5717 - RNA, 19 nt, Artificial Sequence
  Synthetic Oligonucleotide
acguucuuuggauggaaag

SEQ ID NO: 5718 - RNA, 19 nt, Artificial Sequence
  Synthetic Oligonucleotide
acauucuuuggguggaagg

SEQ ID NO: 5719 - RNA, 19 nt, Artificial Sequence
  Synthetic Oligonucleotide
acauucuuugguuggaaag

SEQ ID NO: 5720 - RNA, 19 nt, Artificial Sequence
  Synthetic Oligonucleotide
acauucuucggauggaaag

SEQ ID NO: 5721 - RNA, 19 nt, Artificial Sequence
  Synthetic Oligonucleotide
acauucucuggauggaaag

SEQ ID NO: 5722 - RNA, 19 nt, Artificial Sequence
  Synthetic Oligonucleotide
aaauucuuuggauggaaag

SEQ ID NO: 5723 - RNA, 19 nt, Artificial Sequence
  Synthetic Oligonucleotide
acauucuuuggauggaaga

SEQ ID NO: 5724 - RNA, 19 nt, Artificial Sequence
  Synthetic Oligonucleotide
acauucuuuggcuggagag

SEQ ID NO: 5725 - RNA, 19 nt, Artificial Sequence
  Synthetic Oligonucleotide
acauuuuuuggcuggaaag

SEQ ID NO: 5726 - RNA, 19 nt, Artificial Sequence
  Synthetic Oligonucleotide
acauuuuucggauggaaag

SEQ ID NO: 5727 - RNA, 19 nt, Artificial Sequence
  Synthetic Oligonucleotide
acauucuucggcuggagag

SEQ ID NO: 5728 - RNA, 19 nt, Artificial Sequence
  Synthetic Oligonucleotide
acauucuucgguuggaagg

SEQ ID NO: 5729 - RNA, 19 nt, Artificial Sequence
  Synthetic Oligonucleotide
acauuuuucggcuggaaag

SEQ ID NO: 5730 - RNA, 19 nt, Artificial Sequence
  Synthetic Oligonucleotide
acauuuuucgguuggaaag

SEQ ID NO: 5731 - RNA, 19 nt, Artificial Sequence
  Synthetic Oligonucleotide
acuuuuuucggauggaaag

SEQ ID NO: 5732 - RNA, 19 nt, Artificial Sequence
  Synthetic Oligonucleotide
cauucuuuggauggaagga

SEQ ID NO: 5733 - RNA, 19 nt, Artificial Sequence
  Synthetic Oligonucleotide
cauucuuuggguggaaaga

SEQ ID NO: 5734 - RNA, 19 nt, Artificial Sequence
  Synthetic Oligonucleotide
cauuuuuuggauggaaaga

SEQ ID NO: 5735 - RNA, 19 nt, Artificial Sequence
  Synthetic Oligonucleotide
cguucuuuggauggaaaga

SEQ ID NO: 5736 - RNA, 19 nt, Artificial Sequence
  Synthetic Oligonucleotide
cauucuuuggguggaagga

SEQ ID NO: 5737 - RNA, 19 nt, Artificial Sequence
  Synthetic Oligonucleotide
cauucuuugguuggaaaga

SEQ ID NO: 5738 - RNA, 19 nt, Artificial Sequence
  Synthetic Oligonucleotide
cauucuucggauggaaaga

SEQ ID NO: 5739 - RNA, 19 nt, Artificial Sequence
  Synthetic Oligonucleotide
cauucucuggauggaaaga

SEQ ID NO: 5740 - RNA, 19 nt, Artificial Sequence
  Synthetic Oligonucleotide
aauucuuuggauggaaaga

SEQ ID NO: 5741 - RNA, 19 nt, Artificial Sequence
  Synthetic Oligonucleotide
cauucuuuggauggaagaa

SEQ ID NO: 5742 - RNA, 19 nt, Artificial Sequence
  Synthetic Oligonucleotide
cauucuuuggcuggagaga

SEQ ID NO: 5743 - RNA, 19 nt, Artificial Sequence
  Synthetic Oligonucleotide
cauuuuuuggcuggaaaga

SEQ ID NO: 5744 - RNA, 19 nt, Artificial Sequence
  Synthetic Oligonucleotide
cauuuuucggauggaaaga

SEQ ID NO: 5745 - RNA, 19 nt, Artificial Sequence
  Synthetic Oligonucleotide
cauucuucggcuggagaga

SEQ ID NO: 5746 - RNA, 19 nt, Artificial Sequence
  Synthetic Oligonucleotide
cauucuucgguuggaagga

SEQ ID NO: 5747 - RNA, 19 nt, Artificial Sequence
  Synthetic Oligonucleotide
cauuuuucggcuggaaaga

SEQ ID NO: 5748 - RNA, 19 nt, Artificial Sequence
  Synthetic Oligonucleotide
cauuuuucgguuggaaaga

SEQ ID NO: 5749 - RNA, 19 nt, Artificial Sequence
  Synthetic Oligonucleotide
cuuuuuucggauggaaaga

SEQ ID NO: 5750 - RNA, 19 nt, Artificial Sequence
  Synthetic Oligonucleotide
cuauguggauggauucgga

SEQ ID NO: 5751 - RNA, 19 nt, Artificial Sequence
  Synthetic Oligonucleotide
cuauguggauggauuugaa

SEQ ID NO: 5752 - RNA, 19 nt, Artificial Sequence
  Synthetic Oligonucleotide
cuauguggauggguucgaa

SEQ ID NO: 5753 - RNA, 19 nt, Artificial Sequence
  Synthetic Oligonucleotide
cuauguggauggauucaaa

SEQ ID NO: 5754 - RNA, 19 nt, Artificial Sequence
  Synthetic Oligonucleotide
cuauguggauggauacgaa

SEQ ID NO: 5755 - RNA, 19 nt, Artificial Sequence
  Synthetic Oligonucleotide
cuauguggauagauucgaa

SEQ ID NO: 5756 - RNA, 19 nt, Artificial Sequence
  Synthetic Oligonucleotide
cuauguagauggauucgaa

SEQ ID NO: 5757 - RNA, 19 nt, Artificial Sequence
  Synthetic Oligonucleotide
auauguggauggauucgaa

SEQ ID NO: 5758 - RNA, 19 nt, Artificial Sequence
  Synthetic Oligonucleotide
cuauguggauggauuuaaa

SEQ ID NO: 5759 - RNA, 19 nt, Artificial Sequence
  Synthetic Oligonucleotide
cuauguagauggauucgag

SEQ ID NO: 5760 - RNA, 19 nt, Artificial Sequence
  Synthetic Oligonucleotide
cuauguagauggguucgaa

SEQ ID NO: 5761 - RNA, 19 nt, Artificial Sequence
  Synthetic Oligonucleotide
cuauguggauggauuuaau

SEQ ID NO: 5762 - RNA, 19 nt, Artificial Sequence
  Synthetic Oligonucleotide
ccuauguggauggauucgg

SEQ ID NO: 5763 - RNA, 19 nt, Artificial Sequence
  Synthetic Oligonucleotide
ccuauguggauggauuuga

SEQ ID NO: 5764 - RNA, 19 nt, Artificial Sequence
  Synthetic Oligonucleotide
ccuauguggauggguucga

SEQ ID NO: 5765 - RNA, 19 nt, Artificial Sequence
  Synthetic Oligonucleotide
ccuauguggauggauucaa

SEQ ID NO: 5766 - RNA, 19 nt, Artificial Sequence
  Synthetic Oligonucleotide
ccuauguggauggauacga

SEQ ID NO: 5767 - RNA, 19 nt, Artificial Sequence
  Synthetic Oligonucleotide
ccuauguggauagauucga

SEQ ID NO: 5768 - RNA, 19 nt, Artificial Sequence
  Synthetic Oligonucleotide
ccuauguagauggauucga

SEQ ID NO: 5769 - RNA, 19 nt, Artificial Sequence
  Synthetic Oligonucleotide
cauauguggauggauucga

SEQ ID NO: 5770 - RNA, 19 nt, Artificial Sequence
  Synthetic Oligonucleotide
ccuauguggauggauuuaa

SEQ ID NO: 5771 - RNA, 19 nt, Artificial Sequence
  Synthetic Oligonucleotide
ccuauguagauggguucga

SEQ ID NO: 5772 - RNA, 19 nt, Artificial Sequence
  Synthetic Oligonucleotide
auguggauggauucgaauc

SEQ ID NO: 5773 - RNA, 19 nt, Artificial Sequence
  Synthetic Oligonucleotide
auguggauggauucggacc

SEQ ID NO: 5774 - RNA, 19 nt, Artificial Sequence
  Synthetic Oligonucleotide
auguggauggauuugaacc

SEQ ID NO: 5775 - RNA, 19 nt, Artificial Sequence
  Synthetic Oligonucleotide
auguggauggguucgaacc

SEQ ID NO: 5776 - RNA, 19 nt, Artificial Sequence
  Synthetic Oligonucleotide
auguggauggauucgaaac

SEQ ID NO: 5777 - RNA, 19 nt, Artificial Sequence
  Synthetic Oligonucleotide
auguggauggauucaaacc

SEQ ID NO: 5778 - RNA, 19 nt, Artificial Sequence
  Synthetic Oligonucleotide
auguggauggauacgaacc

SEQ ID NO: 5779 - RNA, 19 nt, Artificial Sequence
  Synthetic Oligonucleotide
auguggauagauucgaacc

SEQ ID NO: 5780 - RNA, 19 nt, Artificial Sequence
  Synthetic Oligonucleotide
auguagauggauucgaacc

SEQ ID NO: 5781 - RNA, 19 nt, Artificial Sequence
  Synthetic Oligonucleotide
auguggauggauuuaaacc

SEQ ID NO: 5782 - RNA, 19 nt, Artificial Sequence
  Synthetic Oligonucleotide
auguagauggauucgagcc

SEQ ID NO: 5783 - RNA, 19 nt, Artificial Sequence
  Synthetic Oligonucleotide
auguagauggguucgaacc

SEQ ID NO: 5784 - RNA, 19 nt, Artificial Sequence
  Synthetic Oligonucleotide
auguggauggauuuaaucc

SEQ ID NO: 5785 - RNA, 19 nt, Artificial Sequence
  Synthetic Oligonucleotide
uauguggauggauucgaau

SEQ ID NO: 5786 - RNA, 19 nt, Artificial Sequence
  Synthetic Oligonucleotide
uauguggauggauucggac

SEQ ID NO: 5787 - RNA, 19 nt, Artificial Sequence
  Synthetic Oligonucleotide
uauguggauggauuugaac

SEQ ID NO: 5788 - RNA, 19 nt, Artificial Sequence
  Synthetic Oligonucleotide
uauguggauggguucgaac

SEQ ID NO: 5789 - RNA, 19 nt, Artificial Sequence
  Synthetic Oligonucleotide
uauguggauggauucgaaa

SEQ ID NO: 5790 - RNA, 19 nt, Artificial Sequence
  Synthetic Oligonucleotide
uauguggauggauucaaac

SEQ ID NO: 5791 - RNA, 19 nt, Artificial Sequence
  Synthetic Oligonucleotide
uauguggauggauacgaac

SEQ ID NO: 5792 - RNA, 19 nt, Artificial Sequence
  Synthetic Oligonucleotide
uauguggauagauucgaac

SEQ ID NO: 5793 - RNA, 19 nt, Artificial Sequence
  Synthetic Oligonucleotide
uauguagauggauucgaac

SEQ ID NO: 5794 - RNA, 19 nt, Artificial Sequence
  Synthetic Oligonucleotide
uauguggauggauuuaaac

SEQ ID NO: 5795 - RNA, 19 nt, Artificial Sequence
  Synthetic Oligonucleotide
uauguagauggauucgagc

SEQ ID NO: 5796 - RNA, 19 nt, Artificial Sequence
  Synthetic Oligonucleotide
uauguagauggguucgaac

SEQ ID NO: 5797 - RNA, 19 nt, Artificial Sequence
  Synthetic Oligonucleotide
uauguggauggauuuaauc

SEQ ID NO: 5798 - RNA, 19 nt, Artificial Sequence
  Synthetic Oligonucleotide
uaaacuuugugaguaugga

SEQ ID NO: 5799 - RNA, 19 nt, Artificial Sequence
  Synthetic Oligonucleotide
uaaauuuugugagcaugga

SEQ ID NO: 5800 - RNA, 19 nt, Artificial Sequence
  Synthetic Oligonucleotide
ugaacuuugugagcaugga

SEQ ID NO: 5801 - RNA, 19 nt, Artificial Sequence
  Synthetic Oligonucleotide
uaaauuuugugaguaugga

SEQ ID NO: 5802 - RNA, 19 nt, Artificial Sequence
  Synthetic Oligonucleotide
ugaacuuugugaguaugga

SEQ ID NO: 5803 - RNA, 19 nt, Artificial Sequence
  Synthetic Oligonucleotide
uaaacuuuguuagcaugga

SEQ ID NO: 5804 - RNA, 19 nt, Artificial Sequence
  Synthetic Oligonucleotide
uaaacuuuaugagcaugga

SEQ ID NO: 5805 - RNA, 19 nt, Artificial Sequence
  Synthetic Oligonucleotide
uaaacuucgugagcaugga

SEQ ID NO: 5806 - RNA, 19 nt, Artificial Sequence
  Synthetic Oligonucleotide
ugaacuuuguaagcaugga

SEQ ID NO: 5807 - RNA, 19 nt, Artificial Sequence
  Synthetic Oligonucleotide
uuaauuuugugagcaugga

SEQ ID NO: 5808 - RNA, 19 nt, Artificial Sequence
  Synthetic Oligonucleotide
uaaauuuuguaaguaugga

SEQ ID NO: 5809 - RNA, 19 nt, Artificial Sequence
  Synthetic Oligonucleotide
uaaauuaugugaguaugga

SEQ ID NO: 5810 - RNA, 19 nt, Artificial Sequence
  Synthetic Oligonucleotide
guaaacuuugugaguaugg

SEQ ID NO: 5811 - RNA, 19 nt, Artificial Sequence
  Synthetic Oligonucleotide
guaaauuuugugagcaugg

SEQ ID NO: 5812 - RNA, 19 nt, Artificial Sequence
  Synthetic Oligonucleotide
gugaacuuugugagcaugg

SEQ ID NO: 5813 - RNA, 19 nt, Artificial Sequence
  Synthetic Oligonucleotide
guaaauuuugugaguaugg

SEQ ID NO: 5814 - RNA, 19 nt, Artificial Sequence
  Synthetic Oligonucleotide
gugaacuuugugaguaugg

SEQ ID NO: 5815 - RNA, 19 nt, Artificial Sequence
  Synthetic Oligonucleotide
guaaacuuuguuagcaugg

SEQ ID NO: 5816 - RNA, 19 nt, Artificial Sequence
  Synthetic Oligonucleotide
guaaacuuuaugagcaugg

SEQ ID NO: 5817 - RNA, 19 nt, Artificial Sequence
  Synthetic Oligonucleotide
guaaacuucgugagcaugg

SEQ ID NO: 5818 - RNA, 19 nt, Artificial Sequence
  Synthetic Oligonucleotide
gugaacuuuguaagcaugg

SEQ ID NO: 5819 - RNA, 19 nt, Artificial Sequence
  Synthetic Oligonucleotide
guuaauuuugugagcaugg

SEQ ID NO: 5820 - RNA, 19 nt, Artificial Sequence
  Synthetic Oligonucleotide
guaaauuuuguaaguaugg

SEQ ID NO: 5821 - RNA, 19 nt, Artificial Sequence
  Synthetic Oligonucleotide
guaaauuaugugaguaugg

SEQ ID NO: 5822 - RNA, 19 nt, Artificial Sequence
  Synthetic Oligonucleotide
ugguaaacuuugugaguau

SEQ ID NO: 5823 - RNA, 19 nt, Artificial Sequence
  Synthetic Oligonucleotide
ugguaaauuuugugagcau

SEQ ID NO: 5824 - RNA, 19 nt, Artificial Sequence
  Synthetic Oligonucleotide
uggugaacuuugugagcau

SEQ ID NO: 5825 - RNA, 19 nt, Artificial Sequence
  Synthetic Oligonucleotide
ugguaaauuuugugaguau

SEQ ID NO: 5826 - RNA, 19 nt, Artificial Sequence
  Synthetic Oligonucleotide
uggugaacuuugugaguau

SEQ ID NO: 5827 - RNA, 19 nt, Artificial Sequence
  Synthetic Oligonucleotide
ugguaaacuuuguuagcau

SEQ ID NO: 5828 - RNA, 19 nt, Artificial Sequence
  Synthetic Oligonucleotide
ugguaaacuuuaugagcau

SEQ ID NO: 5829 - RNA, 19 nt, Artificial Sequence
  Synthetic Oligonucleotide
ugguaaacuucgugagcau

SEQ ID NO: 5830 - RNA, 19 nt, Artificial Sequence
  Synthetic Oligonucleotide
uuguaaacuuugugagcau

SEQ ID NO: 5831 - RNA, 19 nt, Artificial Sequence
  Synthetic Oligonucleotide
uggugaacuuuguaagcau

SEQ ID NO: 5832 - RNA, 19 nt, Artificial Sequence
  Synthetic Oligonucleotide
ugguuaauuuugugagcau

SEQ ID NO: 5833 - RNA, 19 nt, Artificial Sequence
  Synthetic Oligonucleotide
uaguaaauuuugugagcau

SEQ ID NO: 5834 - RNA, 19 nt, Artificial Sequence
  Synthetic Oligonucleotide
ugguaaauuuuguaaguau

SEQ ID NO: 5835 - RNA, 19 nt, Artificial Sequence
  Synthetic Oligonucleotide
ugguaaauuaugugaguau

SEQ ID NO: 5836 - RNA, 19 nt, Artificial Sequence
  Synthetic Oligonucleotide
gcgauuugaagcaguauga

SEQ ID NO: 5837 - RNA, 19 nt, Artificial Sequence
  Synthetic Oligonucleotide
gcgauuugaggcaauauga

SEQ ID NO: 5838 - RNA, 19 nt, Artificial Sequence
  Synthetic Oligonucleotide
gugauuugaagcaauauga

SEQ ID NO: 5839 - RNA, 19 nt, Artificial Sequence
  Synthetic Oligonucleotide
gcgauuugaagcaauauaa

SEQ ID NO: 5840 - RNA, 19 nt, Artificial Sequence
  Synthetic Oligonucleotide
gcgauuugaagcaauauua

SEQ ID NO: 5841 - RNA, 19 nt, Artificial Sequence
  Synthetic Oligonucleotide
gcgauuugaagcaauacga

SEQ ID NO: 5842 - RNA, 19 nt, Artificial Sequence
  Synthetic Oligonucleotide
gcgauuugaaacaauauga

SEQ ID NO: 5843 - RNA, 19 nt, Artificial Sequence
  Synthetic Oligonucleotide
gcgauuuaaagcaauauga

SEQ ID NO: 5844 - RNA, 19 nt, Artificial Sequence
  Synthetic Oligonucleotide
gcgaucugaagcaauauga

SEQ ID NO: 5845 - RNA, 19 nt, Artificial Sequence
  Synthetic Oligonucleotide
gcgacuugaagcaauauga

SEQ ID NO: 5846 - RNA, 19 nt, Artificial Sequence
  Synthetic Oligonucleotide
acgauuugaagcaauauga

SEQ ID NO: 5847 - RNA, 19 nt, Artificial Sequence
  Synthetic Oligonucleotide
ucgauuugaagcaauauga

SEQ ID NO: 5848 - RNA, 19 nt, Artificial Sequence
  Synthetic Oligonucleotide
gcgacuugaagcaauauua

SEQ ID NO: 5849 - RNA, 19 nt, Artificial Sequence
  Synthetic Oligonucleotide
gugauuuaaaacaauauga

SEQ ID NO: 5850 - RNA, 19 nt, Artificial Sequence
  Synthetic Oligonucleotide
gugguaaacuuugugagua

SEQ ID NO: 5851 - RNA, 19 nt, Artificial Sequence
  Synthetic Oligonucleotide
gugguaaauuuugugagca

SEQ ID NO: 5852 - RNA, 19 nt, Artificial Sequence
  Synthetic Oligonucleotide
guggugaacuuugugagca

SEQ ID NO: 5853 - RNA, 19 nt, Artificial Sequence
  Synthetic Oligonucleotide
gugguaaauuuugugagua

SEQ ID NO: 5854 - RNA, 19 nt, Artificial Sequence
  Synthetic Oligonucleotide
guggugaacuuugugagua

SEQ ID NO: 5855 - RNA, 19 nt, Artificial Sequence
  Synthetic Oligonucleotide
gugguaaacuuuguuagca

SEQ ID NO: 5856 - RNA, 19 nt, Artificial Sequence
  Synthetic Oligonucleotide
gugguaaacuuuaugagca

SEQ ID NO: 5857 - RNA, 19 nt, Artificial Sequence
  Synthetic Oligonucleotide
gugguaaacuucgugagca

SEQ ID NO: 5858 - RNA, 19 nt, Artificial Sequence
  Synthetic Oligonucleotide
guuguaaacuuugugagca

SEQ ID NO: 5859 - RNA, 19 nt, Artificial Sequence
  Synthetic Oligonucleotide
guggugaacuuuguaagca

SEQ ID NO: 5860 - RNA, 19 nt, Artificial Sequence
  Synthetic Oligonucleotide
gugguuaauuuugugagca

SEQ ID NO: 5861 - RNA, 19 nt, Artificial Sequence
  Synthetic Oligonucleotide
guaguaaauuuugugagca

SEQ ID NO: 5862 - RNA, 19 nt, Artificial Sequence
  Synthetic Oligonucleotide
gugguaaauuuuguaagua

SEQ ID NO: 5863 - RNA, 19 nt, Artificial Sequence
  Synthetic Oligonucleotide
gugguaaauuaugugagua

SEQ ID NO: 5864 - RNA, 19 nt, Artificial Sequence
  Synthetic Oligonucleotide
gguaaacuuugugaguaug

SEQ ID NO: 5865 - RNA, 19 nt, Artificial Sequence
  Synthetic Oligonucleotide
gguaaauuuugugagcaug

SEQ ID NO: 5866 - RNA, 19 nt, Artificial Sequence
  Synthetic Oligonucleotide
ggugaacuuugugagcaug

SEQ ID NO: 5867 - RNA, 19 nt, Artificial Sequence
  Synthetic Oligonucleotide
gguaaauuuugugaguaug

SEQ ID NO: 5868 - RNA, 19 nt, Artificial Sequence
  Synthetic Oligonucleotide
ggugaacuuugugaguaug

SEQ ID NO: 5869 - RNA, 19 nt, Artificial Sequence
  Synthetic Oligonucleotide
gguaaacuuuguuagcaug

SEQ ID NO: 5870 - RNA, 19 nt, Artificial Sequence
  Synthetic Oligonucleotide
gguaaacuuuaugagcaug

SEQ ID NO: 5871 - RNA, 19 nt, Artificial Sequence
  Synthetic Oligonucleotide
gguaaacuucgugagcaug

SEQ ID NO: 5872 - RNA, 19 nt, Artificial Sequence
  Synthetic Oligonucleotide
uguaaacuuugugagcaug

SEQ ID NO: 5873 - RNA, 19 nt, Artificial Sequence
  Synthetic Oligonucleotide
ggugaacuuuguaagcaug

SEQ ID NO: 5874 - RNA, 19 nt, Artificial Sequence
  Synthetic Oligonucleotide
gguuaauuuugugagcaug

SEQ ID NO: 5875 - RNA, 19 nt, Artificial Sequence
  Synthetic Oligonucleotide
aguaaauuuugugagcaug

SEQ ID NO: 5876 - RNA, 19 nt, Artificial Sequence
  Synthetic Oligonucleotide
gguaaauuuuguaaguaug

SEQ ID NO: 5877 - RNA, 19 nt, Artificial Sequence
  Synthetic Oligonucleotide
gguaaauuaugugaguaug

SEQ ID NO: 5878 - RNA, 19 nt, Artificial Sequence
  Synthetic Oligonucleotide
gauuugaagcaguaugaua

SEQ ID NO: 5879 - RNA, 19 nt, Artificial Sequence
  Synthetic Oligonucleotide
gauuugaggcaauaugaua

SEQ ID NO: 5880 - RNA, 19 nt, Artificial Sequence
  Synthetic Oligonucleotide
gauuugaagcaauaugaca

SEQ ID NO: 5881 - RNA, 19 nt, Artificial Sequence
  Synthetic Oligonucleotide
gauuugaagcaauauaaua

SEQ ID NO: 5882 - RNA, 19 nt, Artificial Sequence
  Synthetic Oligonucleotide
gauuugaagcaauauuaua

SEQ ID NO: 5883 - RNA, 19 nt, Artificial Sequence
  Synthetic Oligonucleotide
gauuugaagcaauacgaua

SEQ ID NO: 5884 - RNA, 19 nt, Artificial Sequence
  Synthetic Oligonucleotide
gauuugaaacaauaugaua

SEQ ID NO: 5885 - RNA, 19 nt, Artificial Sequence
  Synthetic Oligonucleotide
gauuuaaagcaauaugaua

SEQ ID NO: 5886 - RNA, 19 nt, Artificial Sequence
  Synthetic Oligonucleotide
gaucugaagcaauaugaua

SEQ ID NO: 5887 - RNA, 19 nt, Artificial Sequence
  Synthetic Oligonucleotide
gacuugaagcaauaugaua

SEQ ID NO: 5888 - RNA, 19 nt, Artificial Sequence
  Synthetic Oligonucleotide
gacuugaagcaauauuaua

SEQ ID NO: 5889 - RNA, 19 nt, Artificial Sequence
  Synthetic Oligonucleotide
gauuuaaagcaguaugaca

SEQ ID NO: 5890 - RNA, 19 nt, Artificial Sequence
  Synthetic Oligonucleotide
gauuuaaaacaauaugaca

SEQ ID NO: 5891 - RNA, 19 nt, Artificial Sequence
  Synthetic Oligonucleotide
auuugaagcaguaugauag

SEQ ID NO: 5892 - RNA, 19 nt, Artificial Sequence
  Synthetic Oligonucleotide
auuugaggcaauaugauag

SEQ ID NO: 5893 - RNA, 19 nt, Artificial Sequence
  Synthetic Oligonucleotide
auuugaagcaauaugauaa

SEQ ID NO: 5894 - RNA, 19 nt, Artificial Sequence
  Synthetic Oligonucleotide
auuugaagcaauaugacag

SEQ ID NO: 5895 - RNA, 19 nt, Artificial Sequence
  Synthetic Oligonucleotide
auuugaagcaauauaauag

SEQ ID NO: 5896 - RNA, 19 nt, Artificial Sequence
  Synthetic Oligonucleotide
auuugaagcaauauuauag

SEQ ID NO: 5897 - RNA, 19 nt, Artificial Sequence
  Synthetic Oligonucleotide
auuugaagcaauacgauag

SEQ ID NO: 5898 - RNA, 19 nt, Artificial Sequence
  Synthetic Oligonucleotide
auuugaaacaauaugauag

SEQ ID NO: 5899 - RNA, 19 nt, Artificial Sequence
  Synthetic Oligonucleotide
auuuaaagcaauaugauag

SEQ ID NO: 5900 - RNA, 19 nt, Artificial Sequence
  Synthetic Oligonucleotide
aucugaagcaauaugauag

SEQ ID NO: 5901 - RNA, 19 nt, Artificial Sequence
  Synthetic Oligonucleotide
acuugaagcaauaugauag

SEQ ID NO: 5902 - RNA, 19 nt, Artificial Sequence
  Synthetic Oligonucleotide
acuugaagcaauauuauag

SEQ ID NO: 5903 - RNA, 19 nt, Artificial Sequence
  Synthetic Oligonucleotide
auuuaaagcaguaugacag

SEQ ID NO: 5904 - RNA, 19 nt, Artificial Sequence
  Synthetic Oligonucleotide
auuuaaaacaauaugacag

SEQ ID NO: 5905 - RNA, 19 nt, Artificial Sequence
  Synthetic Oligonucleotide
gccuauguggauggauuug

SEQ ID NO: 5906 - RNA, 19 nt, Artificial Sequence
  Synthetic Oligonucleotide
gccuauguggauggguucg

SEQ ID NO: 5907 - RNA, 19 nt, Artificial Sequence
  Synthetic Oligonucleotide
gccuauguggauggauuca

SEQ ID NO: 5908 - RNA, 19 nt, Artificial Sequence
  Synthetic Oligonucleotide
gccuauguggauggauacg

SEQ ID NO: 5909 - RNA, 19 nt, Artificial Sequence
  Synthetic Oligonucleotide
gccuauguggauagauucg

SEQ ID NO: 5910 - RNA, 19 nt, Artificial Sequence
  Synthetic Oligonucleotide
gccuauguagauggauucg

SEQ ID NO: 5911 - RNA, 19 nt, Artificial Sequence
  Synthetic Oligonucleotide
gcauauguggauggauucg

SEQ ID NO: 5912 - RNA, 19 nt, Artificial Sequence
  Synthetic Oligonucleotide
accuauguggauggauucg

SEQ ID NO: 5913 - RNA, 19 nt, Artificial Sequence
  Synthetic Oligonucleotide
gccuauguggauggauuua

SEQ ID NO: 5914 - RNA, 19 nt, Artificial Sequence
  Synthetic Oligonucleotide
gccuauguagauggguucg

SEQ ID NO: 5915 - RNA, 19 nt, Artificial Sequence
  Synthetic Oligonucleotide
accuauguggauggauuua

SEQ ID NO: 5916 - RNA, 19 nt, Artificial Sequence
  Synthetic Oligonucleotide
uaagcgauuugaagcagua

SEQ ID NO: 5917 - RNA, 19 nt, Artificial Sequence
  Synthetic Oligonucleotide
uaagcgauuugaggcaaua

SEQ ID NO: 5918 - RNA, 19 nt, Artificial Sequence
  Synthetic Oligonucleotide
uaagugauuugaagcaaua

SEQ ID NO: 5919 - RNA, 19 nt, Artificial Sequence
  Synthetic Oligonucleotide
uaggcgauuugaagcaaua

SEQ ID NO: 5920 - RNA, 19 nt, Artificial Sequence
  Synthetic Oligonucleotide
ugagcgauuugaagcaaua

SEQ ID NO: 5921 - RNA, 19 nt, Artificial Sequence
  Synthetic Oligonucleotide
uaggugauuugaagcaaua

SEQ ID NO: 5922 - RNA, 19 nt, Artificial Sequence
  Synthetic Oligonucleotide
uaagcgauuugaaacaaua

SEQ ID NO: 5923 - RNA, 19 nt, Artificial Sequence
  Synthetic Oligonucleotide
uaagcgauuuaaagcaaua

SEQ ID NO: 5924 - RNA, 19 nt, Artificial Sequence
  Synthetic Oligonucleotide
uaagcgaucugaagcaaua

SEQ ID NO: 5925 - RNA, 19 nt, Artificial Sequence
  Synthetic Oligonucleotide
uaagcgacuugaagcaaua

SEQ ID NO: 5926 - RNA, 19 nt, Artificial Sequence
  Synthetic Oligonucleotide
uaaacgauuugaagcaaua

SEQ ID NO: 5927 - RNA, 19 nt, Artificial Sequence
  Synthetic Oligonucleotide
uaaucgauuugaagcaaua

SEQ ID NO: 5928 - RNA, 19 nt, Artificial Sequence
  Synthetic Oligonucleotide
uuagcgauuugaagcaaua

SEQ ID NO: 5929 - RNA, 19 nt, Artificial Sequence
  Synthetic Oligonucleotide
caagcgauuugaagcaaua

SEQ ID NO: 5930 - RNA, 19 nt, Artificial Sequence
  Synthetic Oligonucleotide
uaggcgacuugaagcaaua

SEQ ID NO: 5931 - RNA, 19 nt, Artificial Sequence
  Synthetic Oligonucleotide
ucagcgauuuaaagcaaua

SEQ ID NO: 5932 - RNA, 19 nt, Artificial Sequence
  Synthetic Oligonucleotide
aagcgauuugaagcaguau

SEQ ID NO: 5933 - RNA, 19 nt, Artificial Sequence
  Synthetic Oligonucleotide
aagcgauuugaggcaauau

SEQ ID NO: 5934 - RNA, 19 nt, Artificial Sequence
  Synthetic Oligonucleotide
aagugauuugaagcaauau

SEQ ID NO: 5935 - RNA, 19 nt, Artificial Sequence
  Synthetic Oligonucleotide
aggcgauuugaagcaauau

SEQ ID NO: 5936 - RNA, 19 nt, Artificial Sequence
  Synthetic Oligonucleotide
gagcgauuugaagcaauau

SEQ ID NO: 5937 - RNA, 19 nt, Artificial Sequence
  Synthetic Oligonucleotide
aggugauuugaagcaauau

SEQ ID NO: 5938 - RNA, 19 nt, Artificial Sequence
  Synthetic Oligonucleotide
aagcgauuugaagcaauac

SEQ ID NO: 5939 - RNA, 19 nt, Artificial Sequence
  Synthetic Oligonucleotide
aagcgauuugaaacaauau

SEQ ID NO: 5940 - RNA, 19 nt, Artificial Sequence
  Synthetic Oligonucleotide
aagcgauuuaaagcaauau

SEQ ID NO: 5941 - RNA, 19 nt, Artificial Sequence
  Synthetic Oligonucleotide
aagcgaucugaagcaauau

SEQ ID NO: 5942 - RNA, 19 nt, Artificial Sequence
  Synthetic Oligonucleotide
aagcgacuugaagcaauau

SEQ ID NO: 5943 - RNA, 19 nt, Artificial Sequence
  Synthetic Oligonucleotide
aaacgauuugaagcaauau

SEQ ID NO: 5944 - RNA, 19 nt, Artificial Sequence
  Synthetic Oligonucleotide
aaucgauuugaagcaauau

SEQ ID NO: 5945 - RNA, 19 nt, Artificial Sequence
  Synthetic Oligonucleotide
uagcgauuugaagcaauau

SEQ ID NO: 5946 - RNA, 19 nt, Artificial Sequence
  Synthetic Oligonucleotide
aggcgacuugaagcaauau

SEQ ID NO: 5947 - RNA, 19 nt, Artificial Sequence
  Synthetic Oligonucleotide
cagcgauuuaaagcaauau

SEQ ID NO: 5948 - RNA, 19 nt, Artificial Sequence
  Synthetic Oligonucleotide
aaaugaaaugggggaugga

SEQ ID NO: 5949 - RNA, 19 nt, Artificial Sequence
  Synthetic Oligonucleotide
aaaugaaguggggaaugga

SEQ ID NO: 5950 - RNA, 19 nt, Artificial Sequence
  Synthetic Oligonucleotide
agaugaaauggggaaugga

SEQ ID NO: 5951 - RNA, 19 nt, Artificial Sequence
  Synthetic Oligonucleotide
agaugaaaugggggaugga

SEQ ID NO: 5952 - RNA, 19 nt, Artificial Sequence
  Synthetic Oligonucleotide
aaaugaaauggggaauaga

SEQ ID NO: 5953 - RNA, 19 nt, Artificial Sequence
  Synthetic Oligonucleotide
aaaugaaauggggcaugga

SEQ ID NO: 5954 - RNA, 19 nt, Artificial Sequence
  Synthetic Oligonucleotide
aaaugaaaugggguaugga

SEQ ID NO: 5955 - RNA, 19 nt, Artificial Sequence
  Synthetic Oligonucleotide
aaaugaaguggggcaugga

SEQ ID NO: 5956 - RNA, 19 nt, Artificial Sequence
  Synthetic Oligonucleotide
aaaugaagugggguaugga

SEQ ID NO: 5957 - RNA, 19 nt, Artificial Sequence
  Synthetic Oligonucleotide
agaugaaauggggcaugga

SEQ ID NO: 5958 - RNA, 19 nt, Artificial Sequence
  Synthetic Oligonucleotide
agaugaaaugggguaugga

SEQ ID NO: 5959 - RNA, 19 nt, Artificial Sequence
  Synthetic Oligonucleotide
aaaaugaaaugggggaugg

SEQ ID NO: 5960 - RNA, 19 nt, Artificial Sequence
  Synthetic Oligonucleotide
aaaaugaaguggggaaugg

SEQ ID NO: 5961 - RNA, 19 nt, Artificial Sequence
  Synthetic Oligonucleotide
aagaugaaauggggaaugg

SEQ ID NO: 5962 - RNA, 19 nt, Artificial Sequence
  Synthetic Oligonucleotide
aagaugaaaugggggaugg

SEQ ID NO: 5963 - RNA, 19 nt, Artificial Sequence
  Synthetic Oligonucleotide
aaaaugaaauggggaauag

SEQ ID NO: 5964 - RNA, 19 nt, Artificial Sequence
  Synthetic Oligonucleotide
aaaaugaaauggggcaugg

SEQ ID NO: 5965 - RNA, 19 nt, Artificial Sequence
  Synthetic Oligonucleotide
aaaaugaaaugggguaugg

SEQ ID NO: 5966 - RNA, 19 nt, Artificial Sequence
  Synthetic Oligonucleotide
aaaaugaaguggggcaugg

SEQ ID NO: 5967 - RNA, 19 nt, Artificial Sequence
  Synthetic Oligonucleotide
aaaaugaagugggguaugg

SEQ ID NO: 5968 - RNA, 19 nt, Artificial Sequence
  Synthetic Oligonucleotide
aagaugaaauggggcaugg

SEQ ID NO: 5969 - RNA, 19 nt, Artificial Sequence
  Synthetic Oligonucleotide
aagaugaaaugggguaugg

SEQ ID NO: 5970 - RNA, 19 nt, Artificial Sequence
  Synthetic Oligonucleotide
ugaagcaguaugauaguga

SEQ ID NO: 5971 - RNA, 19 nt, Artificial Sequence
  Synthetic Oligonucleotide
ugaggcaauaugauaguga

SEQ ID NO: 5972 - RNA, 19 nt, Artificial Sequence
  Synthetic Oligonucleotide
ugaagcaauaugauaguaa

SEQ ID NO: 5973 - RNA, 19 nt, Artificial Sequence
  Synthetic Oligonucleotide
ugaagcaauaugauagcga

SEQ ID NO: 5974 - RNA, 19 nt, Artificial Sequence
  Synthetic Oligonucleotide
ugaagcaauaugauaauga

SEQ ID NO: 5975 - RNA, 19 nt, Artificial Sequence
  Synthetic Oligonucleotide
ugaagcaauaugacaguga

SEQ ID NO: 5976 - RNA, 19 nt, Artificial Sequence
  Synthetic Oligonucleotide
ugaagcaauauaauaguga

SEQ ID NO: 5977 - RNA, 19 nt, Artificial Sequence
  Synthetic Oligonucleotide
ugaagcaauauuauaguga

SEQ ID NO: 5978 - RNA, 19 nt, Artificial Sequence
  Synthetic Oligonucleotide
ugaagcaauacgauaguga

SEQ ID NO: 5979 - RNA, 19 nt, Artificial Sequence
  Synthetic Oligonucleotide
ugaaacaauaugauaguga

SEQ ID NO: 5980 - RNA, 19 nt, Artificial Sequence
  Synthetic Oligonucleotide
uaaagcaauaugauaguga

SEQ ID NO: 5981 - RNA, 19 nt, Artificial Sequence
  Synthetic Oligonucleotide
ugaagcaauaugacagcga

SEQ ID NO: 5982 - RNA, 19 nt, Artificial Sequence
  Synthetic Oligonucleotide
uaaagcaguaugacaguga

SEQ ID NO: 5983 - RNA, 19 nt, Artificial Sequence
  Synthetic Oligonucleotide
uaaaacaauaugacaguga

SEQ ID NO: 5984 - RNA, 19 nt, Artificial Sequence
  Synthetic Oligonucleotide
agcgauuugaagcaguaug

SEQ ID NO: 5985 - RNA, 19 nt, Artificial Sequence
  Synthetic Oligonucleotide
agcgauuugaggcaauaug

SEQ ID NO: 5986 - RNA, 19 nt, Artificial Sequence
  Synthetic Oligonucleotide
agugauuugaagcaauaug

SEQ ID NO: 5987 - RNA, 19 nt, Artificial Sequence
  Synthetic Oligonucleotide
ggcgauuugaagcaauaug

SEQ ID NO: 5988 - RNA, 19 nt, Artificial Sequence
  Synthetic Oligonucleotide
ggugauuugaagcaauaug

SEQ ID NO: 5989 - RNA, 19 nt, Artificial Sequence
  Synthetic Oligonucleotide
agcgauuugaagcaauaua

SEQ ID NO: 5990 - RNA, 19 nt, Artificial Sequence
  Synthetic Oligonucleotide
agcgauuugaagcaauauu

SEQ ID NO: 5991 - RNA, 19 nt, Artificial Sequence
  Synthetic Oligonucleotide
agcgauuugaagcaauacg

SEQ ID NO: 5992 - RNA, 19 nt, Artificial Sequence
  Synthetic Oligonucleotide
agcgauuugaaacaauaug

SEQ ID NO: 5993 - RNA, 19 nt, Artificial Sequence
  Synthetic Oligonucleotide
agcgauuuaaagcaauaug

SEQ ID NO: 5994 - RNA, 19 nt, Artificial Sequence
  Synthetic Oligonucleotide
agcgaucugaagcaauaug

SEQ ID NO: 5995 - RNA, 19 nt, Artificial Sequence
  Synthetic Oligonucleotide
agcgacuugaagcaauaug

SEQ ID NO: 5996 - RNA, 19 nt, Artificial Sequence
  Synthetic Oligonucleotide
aacgauuugaagcaauaug

SEQ ID NO: 5997 - RNA, 19 nt, Artificial Sequence
  Synthetic Oligonucleotide
aucgauuugaagcaauaug

SEQ ID NO: 5998 - RNA, 19 nt, Artificial Sequence
  Synthetic Oligonucleotide
ggcgacuugaagcaauaug

SEQ ID NO: 5999 - RNA, 19 nt, Artificial Sequence
  Synthetic Oligonucleotide
agcgacuugaagcaauauu

SEQ ID NO: 6000 - RNA, 19 nt, Artificial Sequence
  Synthetic Oligonucleotide
agugauuuaaaacaauaug

SEQ ID NO: 6001 - RNA, 19 nt, Artificial Sequence
  Synthetic Oligonucleotide
aaaugggggauggagauga

SEQ ID NO: 6002 - RNA, 19 nt, Artificial Sequence
  Synthetic Oligonucleotide
aaguggggaauggagauga

SEQ ID NO: 6003 - RNA, 19 nt, Artificial Sequence
  Synthetic Oligonucleotide
aaauggggaauggagcuga

SEQ ID NO: 6004 - RNA, 19 nt, Artificial Sequence
  Synthetic Oligonucleotide
aaauggggaauggaaauga

SEQ ID NO: 6005 - RNA, 19 nt, Artificial Sequence
  Synthetic Oligonucleotide
aaauggggcauggagauga

SEQ ID NO: 6006 - RNA, 19 nt, Artificial Sequence
  Synthetic Oligonucleotide
aaaugggggauggaaauga

SEQ ID NO: 6007 - RNA, 19 nt, Artificial Sequence
  Synthetic Oligonucleotide
aaaugggggauggauauga

SEQ ID NO: 6008 - RNA, 19 nt, Artificial Sequence
  Synthetic Oligonucleotide
aaauggggaauagagcuga

SEQ ID NO: 6009 - RNA, 19 nt, Artificial Sequence
  Synthetic Oligonucleotide
aaauggggcauggaaauga

SEQ ID NO: 6010 - RNA, 19 nt, Artificial Sequence
  Synthetic Oligonucleotide
aaaugggguauggaaauga

SEQ ID NO: 6011 - RNA, 19 nt, Artificial Sequence
  Synthetic Oligonucleotide
aaauggggcauggaaguga

SEQ ID NO: 6012 - RNA, 19 nt, Artificial Sequence
  Synthetic Oligonucleotide
aaguggggcauggaaauga

SEQ ID NO: 6013 - RNA, 19 nt, Artificial Sequence
  Synthetic Oligonucleotide
aagugggguauggaaauga

SEQ ID NO: 6014 - RNA, 19 nt, Artificial Sequence
  Synthetic Oligonucleotide
ugaaaugggggauggagau

SEQ ID NO: 6015 - RNA, 19 nt, Artificial Sequence
  Synthetic Oligonucleotide
ugaaguggggaauggagau

SEQ ID NO: 6016 - RNA, 19 nt, Artificial Sequence
  Synthetic Oligonucleotide
ugaaauggggaauggagcu

SEQ ID NO: 6017 - RNA, 19 nt, Artificial Sequence
  Synthetic Oligonucleotide
ugaaauggggaauggaaau

SEQ ID NO: 6018 - RNA, 19 nt, Artificial Sequence
  Synthetic Oligonucleotide
ugaaauggggcauggagau

SEQ ID NO: 6019 - RNA, 19 nt, Artificial Sequence
  Synthetic Oligonucleotide
ugaaaugggggauggaaau

SEQ ID NO: 6020 - RNA, 19 nt, Artificial Sequence
  Synthetic Oligonucleotide
ugaaaugggggauggauau

SEQ ID NO: 6021 - RNA, 19 nt, Artificial Sequence
  Synthetic Oligonucleotide
ugaaauggggaauagagcu

SEQ ID NO: 6022 - RNA, 19 nt, Artificial Sequence
  Synthetic Oligonucleotide
ugaaauggggcauggaaau

SEQ ID NO: 6023 - RNA, 19 nt, Artificial Sequence
  Synthetic Oligonucleotide
ugaaaugggguauggaaau

SEQ ID NO: 6024 - RNA, 19 nt, Artificial Sequence
  Synthetic Oligonucleotide
ugaaauggggcauggaagu

SEQ ID NO: 6025 - RNA, 19 nt, Artificial Sequence
  Synthetic Oligonucleotide
ugaaguggggcauggaaau

SEQ ID NO: 6026 - RNA, 19 nt, Artificial Sequence
  Synthetic Oligonucleotide
ugaagugggguauggaaau

SEQ ID NO: 6027 - RNA, 19 nt, Artificial Sequence
  Synthetic Oligonucleotide
aaugggggauggagaugag

SEQ ID NO: 6028 - RNA, 19 nt, Artificial Sequence
  Synthetic Oligonucleotide
aguggggaauggagaugag

SEQ ID NO: 6029 - RNA, 19 nt, Artificial Sequence
  Synthetic Oligonucleotide
aauggggaauggagcugag

SEQ ID NO: 6030 - RNA, 19 nt, Artificial Sequence
  Synthetic Oligonucleotide
aauggggaauggaaaugag

SEQ ID NO: 6031 - RNA, 19 nt, Artificial Sequence
  Synthetic Oligonucleotide
aauggggcauggagaugag

SEQ ID NO: 6032 - RNA, 19 nt, Artificial Sequence
  Synthetic Oligonucleotide
aaugggggauggaaaugag

SEQ ID NO: 6033 - RNA, 19 nt, Artificial Sequence
  Synthetic Oligonucleotide
aaugggggauggauaugag

SEQ ID NO: 6034 - RNA, 19 nt, Artificial Sequence
  Synthetic Oligonucleotide
aauggggaauagagcugag

SEQ ID NO: 6035 - RNA, 19 nt, Artificial Sequence
  Synthetic Oligonucleotide
aauggggcauggaaaugag

SEQ ID NO: 6036 - RNA, 19 nt, Artificial Sequence
  Synthetic Oligonucleotide
aaugggguauggaaaugag

SEQ ID NO: 6037 - RNA, 19 nt, Artificial Sequence
  Synthetic Oligonucleotide
aauggggcauggaagugag

SEQ ID NO: 6038 - RNA, 19 nt, Artificial Sequence
  Synthetic Oligonucleotide
aguggggcauggaaaugag

SEQ ID NO: 6039 - RNA, 19 nt, Artificial Sequence
  Synthetic Oligonucleotide
agugggguauggaaaugag

SEQ ID NO: 6040 - RNA, 19 nt, Artificial Sequence
  Synthetic Oligonucleotide
gaaaugggggauggagaug

SEQ ID NO: 6041 - RNA, 19 nt, Artificial Sequence
  Synthetic Oligonucleotide
gaaguggggaauggagaug

SEQ ID NO: 6042 - RNA, 19 nt, Artificial Sequence
  Synthetic Oligonucleotide
gaaauggggaauggagcug

SEQ ID NO: 6043 - RNA, 19 nt, Artificial Sequence
  Synthetic Oligonucleotide
gaaauggggaauggaaaug

SEQ ID NO: 6044 - RNA, 19 nt, Artificial Sequence
  Synthetic Oligonucleotide
gaaauggggcauggagaug

SEQ ID NO: 6045 - RNA, 19 nt, Artificial Sequence
  Synthetic Oligonucleotide
gaaaugggggauggaaaug

SEQ ID NO: 6046 - RNA, 19 nt, Artificial Sequence
  Synthetic Oligonucleotide
gaaaugggggauggauaug

SEQ ID NO: 6047 - RNA, 19 nt, Artificial Sequence
  Synthetic Oligonucleotide
gaaauggggaauagagcug

SEQ ID NO: 6048 - RNA, 19 nt, Artificial Sequence
  Synthetic Oligonucleotide
gaaauggggcauggaaaug

SEQ ID NO: 6049 - RNA, 19 nt, Artificial Sequence
  Synthetic Oligonucleotide
gaaaugggguauggaaaug

SEQ ID NO: 6050 - RNA, 19 nt, Artificial Sequence
  Synthetic Oligonucleotide
gaaauggggcauggaagug

SEQ ID NO: 6051 - RNA, 19 nt, Artificial Sequence
  Synthetic Oligonucleotide
gaaguggggcauggaaaug

SEQ ID NO: 6052 - RNA, 19 nt, Artificial Sequence
  Synthetic Oligonucleotide
gaagugggguauggaaaug

SEQ ID NO: 6053 - RNA, 19 nt, Artificial Sequence
  Synthetic Oligonucleotide
augaaaugggggauggaga

SEQ ID NO: 6054 - RNA, 19 nt, Artificial Sequence
  Synthetic Oligonucleotide
augaaguggggaauggaga

SEQ ID NO: 6055 - RNA, 19 nt, Artificial Sequence
  Synthetic Oligonucleotide
augaaauggggaauggagc

SEQ ID NO: 6056 - RNA, 19 nt, Artificial Sequence
  Synthetic Oligonucleotide
augaaauggggaauggaaa

SEQ ID NO: 6057 - RNA, 19 nt, Artificial Sequence
  Synthetic Oligonucleotide
augaaauggggcauggaga

SEQ ID NO: 6058 - RNA, 19 nt, Artificial Sequence
  Synthetic Oligonucleotide
augaaaugggggauggaaa

SEQ ID NO: 6059 - RNA, 19 nt, Artificial Sequence
  Synthetic Oligonucleotide
augaaaugggggauggaua

SEQ ID NO: 6060 - RNA, 19 nt, Artificial Sequence
  Synthetic Oligonucleotide
augaaauggggaauagagc

SEQ ID NO: 6061 - RNA, 19 nt, Artificial Sequence
  Synthetic Oligonucleotide
augaaauggggcauggaaa

SEQ ID NO: 6062 - RNA, 19 nt, Artificial Sequence
  Synthetic Oligonucleotide
augaaaugggguauggaaa

SEQ ID NO: 6063 - RNA, 19 nt, Artificial Sequence
  Synthetic Oligonucleotide
augaaauggggcauggaag

SEQ ID NO: 6064 - RNA, 19 nt, Artificial Sequence
  Synthetic Oligonucleotide
augaaguggggcauggaaa

SEQ ID NO: 6065 - RNA, 19 nt, Artificial Sequence
  Synthetic Oligonucleotide
augaagugggguauggaaa

SEQ ID NO: 6066 - RNA, 19 nt, Artificial Sequence
  Synthetic Oligonucleotide
uugaagcaguaugauagug

SEQ ID NO: 6067 - RNA, 19 nt, Artificial Sequence
  Synthetic Oligonucleotide
uugaggcaauaugauagug

SEQ ID NO: 6068 - RNA, 19 nt, Artificial Sequence
  Synthetic Oligonucleotide
uugaagcaauaugauagua

SEQ ID NO: 6069 - RNA, 19 nt, Artificial Sequence
  Synthetic Oligonucleotide
uugaagcaauaugauagcg

SEQ ID NO: 6070 - RNA, 19 nt, Artificial Sequence
  Synthetic Oligonucleotide
uugaagcaauaugauaaug

SEQ ID NO: 6071 - RNA, 19 nt, Artificial Sequence
  Synthetic Oligonucleotide
uugaagcaauaugacagug

SEQ ID NO: 6072 - RNA, 19 nt, Artificial Sequence
  Synthetic Oligonucleotide
uugaagcaauauaauagug

SEQ ID NO: 6073 - RNA, 19 nt, Artificial Sequence
  Synthetic Oligonucleotide
uugaagcaauauuauagug

SEQ ID NO: 6074 - RNA, 19 nt, Artificial Sequence
  Synthetic Oligonucleotide
uugaagcaauacgauagug

SEQ ID NO: 6075 - RNA, 19 nt, Artificial Sequence
  Synthetic Oligonucleotide
uugaaacaauaugauagug

SEQ ID NO: 6076 - RNA, 19 nt, Artificial Sequence
  Synthetic Oligonucleotide
uuaaagcaauaugauagug

SEQ ID NO: 6077 - RNA, 19 nt, Artificial Sequence
  Synthetic Oligonucleotide
cugaagcaauaugauagug

SEQ ID NO: 6078 - RNA, 19 nt, Artificial Sequence
  Synthetic Oligonucleotide
uugaagcaauaugacagcg

SEQ ID NO: 6079 - RNA, 19 nt, Artificial Sequence
  Synthetic Oligonucleotide
uuaaagcaguaugacagug

SEQ ID NO: 6080 - RNA, 19 nt, Artificial Sequence
  Synthetic Oligonucleotide
uuaaaacaauaugacagug

SEQ ID NO: 6081 - RNA, 19 nt, Artificial Sequence
  Synthetic Oligonucleotide
cgauuugaagcaguaugau

SEQ ID NO: 6082 - RNA, 19 nt, Artificial Sequence
  Synthetic Oligonucleotide
cgauuugaggcaauaugau

SEQ ID NO: 6083 - RNA, 19 nt, Artificial Sequence
  Synthetic Oligonucleotide
ugauuugaagcaauaugau

SEQ ID NO: 6084 - RNA, 19 nt, Artificial Sequence
  Synthetic Oligonucleotide
cgauuugaagcaauaugac

SEQ ID NO: 6085 - RNA, 19 nt, Artificial Sequence
  Synthetic Oligonucleotide
cgauuugaagcaauauaau

SEQ ID NO: 6086 - RNA, 19 nt, Artificial Sequence
  Synthetic Oligonucleotide
cgauuugaagcaauauuau

SEQ ID NO: 6087 - RNA, 19 nt, Artificial Sequence
  Synthetic Oligonucleotide
cgauuugaagcaauacgau

SEQ ID NO: 6088 - RNA, 19 nt, Artificial Sequence
  Synthetic Oligonucleotide
cgauuugaaacaauaugau

SEQ ID NO: 6089 - RNA, 19 nt, Artificial Sequence
  Synthetic Oligonucleotide
cgauuuaaagcaauaugau

SEQ ID NO: 6090 - RNA, 19 nt, Artificial Sequence
  Synthetic Oligonucleotide
cgaucugaagcaauaugau

SEQ ID NO: 6091 - RNA, 19 nt, Artificial Sequence
  Synthetic Oligonucleotide
cgacuugaagcaauaugau

SEQ ID NO: 6092 - RNA, 19 nt, Artificial Sequence
  Synthetic Oligonucleotide
cgacuugaagcaauauuau

SEQ ID NO: 6093 - RNA, 19 nt, Artificial Sequence
  Synthetic Oligonucleotide
aaugaaaugggggauggag

SEQ ID NO: 6094 - RNA, 19 nt, Artificial Sequence
  Synthetic Oligonucleotide
aaugaaguggggaauggag

SEQ ID NO: 6095 - RNA, 19 nt, Artificial Sequence
  Synthetic Oligonucleotide
gaugaaauggggaauggag

SEQ ID NO: 6096 - RNA, 19 nt, Artificial Sequence
  Synthetic Oligonucleotide
aaugaaauggggaauggaa

SEQ ID NO: 6097 - RNA, 19 nt, Artificial Sequence
  Synthetic Oligonucleotide
aaugaaauggggaauagag

SEQ ID NO: 6098 - RNA, 19 nt, Artificial Sequence
  Synthetic Oligonucleotide
aaugaaaugggggauggaa

SEQ ID NO: 6099 - RNA, 19 nt, Artificial Sequence
  Synthetic Oligonucleotide
gaugaaauggggcauggag

SEQ ID NO: 6100 - RNA, 19 nt, Artificial Sequence
  Synthetic Oligonucleotide
gaugaaaugggggauggaa

SEQ ID NO: 6101 - RNA, 19 nt, Artificial Sequence
  Synthetic Oligonucleotide
gaugaaaugggggauggau

SEQ ID NO: 6102 - RNA, 19 nt, Artificial Sequence
  Synthetic Oligonucleotide
aaugaaauggggcauggaa

SEQ ID NO: 6103 - RNA, 19 nt, Artificial Sequence
  Synthetic Oligonucleotide
aaugaaaugggguauggaa

SEQ ID NO: 6104 - RNA, 19 nt, Artificial Sequence
  Synthetic Oligonucleotide
aaugaaguggggcauggaa

SEQ ID NO: 6105 - RNA, 19 nt, Artificial Sequence
  Synthetic Oligonucleotide
aaugaagugggguauggaa

SEQ ID NO: 6106 - RNA, 19 nt, Artificial Sequence
  Synthetic Oligonucleotide
gaugaaauggggcauggaa

SEQ ID NO: 6107 - RNA, 19 nt, Artificial Sequence
  Synthetic Oligonucleotide
gaugaaaugggguauggaa

SEQ ID NO: 6108 - RNA, 19 nt, Artificial Sequence
  Synthetic Oligonucleotide
auggauucgaaccgaaugg

SEQ ID NO: 6109 - RNA, 19 nt, Artificial Sequence
  Synthetic Oligonucleotide
auggauucgaaucgaacgg

SEQ ID NO: 6110 - RNA, 19 nt, Artificial Sequence
  Synthetic Oligonucleotide
auggauucgagccgaacgg

SEQ ID NO: 6111 - RNA, 19 nt, Artificial Sequence
  Synthetic Oligonucleotide
auggauucggaccgaacgg

SEQ ID NO: 6112 - RNA, 19 nt, Artificial Sequence
  Synthetic Oligonucleotide
auggauuugaaccgaacgg

SEQ ID NO: 6113 - RNA, 19 nt, Artificial Sequence
  Synthetic Oligonucleotide
auggguucgaaccgaacgg

SEQ ID NO: 6114 - RNA, 19 nt, Artificial Sequence
  Synthetic Oligonucleotide
auggauucgaaccaaacgg

SEQ ID NO: 6115 - RNA, 19 nt, Artificial Sequence
  Synthetic Oligonucleotide
auggauucgaacccaacgg

SEQ ID NO: 6116 - RNA, 19 nt, Artificial Sequence
  Synthetic Oligonucleotide
auggauucgaaacgaacgg

SEQ ID NO: 6117 - RNA, 19 nt, Artificial Sequence
  Synthetic Oligonucleotide
auggauucaaaccgaacgg

SEQ ID NO: 6118 - RNA, 19 nt, Artificial Sequence
  Synthetic Oligonucleotide
auggauacgaaccgaacgg

SEQ ID NO: 6119 - RNA, 19 nt, Artificial Sequence
  Synthetic Oligonucleotide
auagauucgaaccgaacgg

SEQ ID NO: 6120 - RNA, 19 nt, Artificial Sequence
  Synthetic Oligonucleotide
auggauuugaaccaaacgg

SEQ ID NO: 6121 - RNA, 19 nt, Artificial Sequence
  Synthetic Oligonucleotide
auggauuuaaaccgaacgg

SEQ ID NO: 6122 - RNA, 19 nt, Artificial Sequence
  Synthetic Oligonucleotide
auggguucgaaccaaacgg

SEQ ID NO: 6123 - RNA, 19 nt, Artificial Sequence
  Synthetic Oligonucleotide
auggauuuaauccgaacgg

SEQ ID NO: 6124 - RNA, 19 nt, Artificial Sequence
  Synthetic Oligonucleotide
gauggauucgaaccgaaug

SEQ ID NO: 6125 - RNA, 19 nt, Artificial Sequence
  Synthetic Oligonucleotide
gauggauucgaaucgaacg

SEQ ID NO: 6126 - RNA, 19 nt, Artificial Sequence
  Synthetic Oligonucleotide
gauggauucgagccgaacg

SEQ ID NO: 6127 - RNA, 19 nt, Artificial Sequence
  Synthetic Oligonucleotide
gauggauucggaccgaacg

SEQ ID NO: 6128 - RNA, 19 nt, Artificial Sequence
  Synthetic Oligonucleotide
gauggauuugaaccgaacg

SEQ ID NO: 6129 - RNA, 19 nt, Artificial Sequence
  Synthetic Oligonucleotide
gauggguucgaaccgaacg

SEQ ID NO: 6130 - RNA, 19 nt, Artificial Sequence
  Synthetic Oligonucleotide
gauggauucgaaccaaacg

SEQ ID NO: 6131 - RNA, 19 nt, Artificial Sequence
  Synthetic Oligonucleotide
gauggauucgaacccaacg

SEQ ID NO: 6132 - RNA, 19 nt, Artificial Sequence
  Synthetic Oligonucleotide
gauggauucgaaacgaacg

SEQ ID NO: 6133 - RNA, 19 nt, Artificial Sequence
  Synthetic Oligonucleotide
gauggauucaaaccgaacg

SEQ ID NO: 6134 - RNA, 19 nt, Artificial Sequence
  Synthetic Oligonucleotide
gauggauacgaaccgaacg

SEQ ID NO: 6135 - RNA, 19 nt, Artificial Sequence
  Synthetic Oligonucleotide
gauagauucgaaccgaacg

SEQ ID NO: 6136 - RNA, 19 nt, Artificial Sequence
  Synthetic Oligonucleotide
gauggauuugaaccaaacg

SEQ ID NO: 6137 - RNA, 19 nt, Artificial Sequence
  Synthetic Oligonucleotide
gauggauuuaaaccgaacg

SEQ ID NO: 6138 - RNA, 19 nt, Artificial Sequence
  Synthetic Oligonucleotide
gauggguucgaaccaaacg

SEQ ID NO: 6139 - RNA, 19 nt, Artificial Sequence
  Synthetic Oligonucleotide
gauggauuuaauccgaacg

SEQ ID NO: 6140 - RNA, 19 nt, Artificial Sequence
  Synthetic Oligonucleotide
uguggauggauucgaaucg

SEQ ID NO: 6141 - RNA, 19 nt, Artificial Sequence
  Synthetic Oligonucleotide
uguggauggauucggaccg

SEQ ID NO: 6142 - RNA, 19 nt, Artificial Sequence
  Synthetic Oligonucleotide
uguggauggauuugaaccg

SEQ ID NO: 6143 - RNA, 19 nt, Artificial Sequence
  Synthetic Oligonucleotide
uguggauggguucgaaccg

SEQ ID NO: 6144 - RNA, 19 nt, Artificial Sequence
  Synthetic Oligonucleotide
uguggauggauucgaacca

SEQ ID NO: 6145 - RNA, 19 nt, Artificial Sequence
  Synthetic Oligonucleotide
uguggauggauucgaaccc

SEQ ID NO: 6146 - RNA, 19 nt, Artificial Sequence
  Synthetic Oligonucleotide
uguggauggauucgaaacg

SEQ ID NO: 6147 - RNA, 19 nt, Artificial Sequence
  Synthetic Oligonucleotide
uguggauggauucaaaccg

SEQ ID NO: 6148 - RNA, 19 nt, Artificial Sequence
  Synthetic Oligonucleotide
uguggauggauacgaaccg

SEQ ID NO: 6149 - RNA, 19 nt, Artificial Sequence
  Synthetic Oligonucleotide
uguggauagauucgaaccg

SEQ ID NO: 6150 - RNA, 19 nt, Artificial Sequence
  Synthetic Oligonucleotide
uguagauggauucgaaccg

SEQ ID NO: 6151 - RNA, 19 nt, Artificial Sequence
  Synthetic Oligonucleotide
uguggauggauuugaacca

SEQ ID NO: 6152 - RNA, 19 nt, Artificial Sequence
  Synthetic Oligonucleotide
uguggauggauuuaaaccg

SEQ ID NO: 6153 - RNA, 19 nt, Artificial Sequence
  Synthetic Oligonucleotide
uguggauggguucgaacca

SEQ ID NO: 6154 - RNA, 19 nt, Artificial Sequence
  Synthetic Oligonucleotide
uguagauggauucgagccg

SEQ ID NO: 6155 - RNA, 19 nt, Artificial Sequence
  Synthetic Oligonucleotide
uguggauggauuuaauccg

SEQ ID NO: 6156 - RNA, 19 nt, Artificial Sequence
  Synthetic Oligonucleotide
uguagauggguucgaacca

SEQ ID NO: 6157 - RNA, 19 nt, Artificial Sequence
  Synthetic Oligonucleotide
guggauggauucgaaucga

SEQ ID NO: 6158 - RNA, 19 nt, Artificial Sequence
  Synthetic Oligonucleotide
guggauggauucggaccga

SEQ ID NO: 6159 - RNA, 19 nt, Artificial Sequence
  Synthetic Oligonucleotide
guggauggauuugaaccga

SEQ ID NO: 6160 - RNA, 19 nt, Artificial Sequence
  Synthetic Oligonucleotide
guggauggguucgaaccga

SEQ ID NO: 6161 - RNA, 19 nt, Artificial Sequence
  Synthetic Oligonucleotide
guggauggauucgaaccaa

SEQ ID NO: 6162 - RNA, 19 nt, Artificial Sequence
  Synthetic Oligonucleotide
guggauggauucgaaccca

SEQ ID NO: 6163 - RNA, 19 nt, Artificial Sequence
  Synthetic Oligonucleotide
guggauggauucgaaacga

SEQ ID NO: 6164 - RNA, 19 nt, Artificial Sequence
  Synthetic Oligonucleotide
guggauggauucaaaccga

SEQ ID NO: 6165 - RNA, 19 nt, Artificial Sequence
  Synthetic Oligonucleotide
guggauggauacgaaccga

SEQ ID NO: 6166 - RNA, 19 nt, Artificial Sequence
  Synthetic Oligonucleotide
guggauagauucgaaccga

SEQ ID NO: 6167 - RNA, 19 nt, Artificial Sequence
  Synthetic Oligonucleotide
guagauggauucgaaccga

SEQ ID NO: 6168 - RNA, 19 nt, Artificial Sequence
  Synthetic Oligonucleotide
guggauggauuugaaccaa

SEQ ID NO: 6169 - RNA, 19 nt, Artificial Sequence
  Synthetic Oligonucleotide
guggauggauuuaaaccga

SEQ ID NO: 6170 - RNA, 19 nt, Artificial Sequence
  Synthetic Oligonucleotide
guggauggguucgaaccaa

SEQ ID NO: 6171 - RNA, 19 nt, Artificial Sequence
  Synthetic Oligonucleotide
guagauggauucgagccga

SEQ ID NO: 6172 - RNA, 19 nt, Artificial Sequence
  Synthetic Oligonucleotide
guggauggauuuaauccga

SEQ ID NO: 6173 - RNA, 19 nt, Artificial Sequence
  Synthetic Oligonucleotide
guagauggguucgaaccaa

SEQ ID NO: 6174 - RNA, 19 nt, Artificial Sequence
  Synthetic Oligonucleotide
uggauggauucgaaucgaa

SEQ ID NO: 6175 - RNA, 19 nt, Artificial Sequence
  Synthetic Oligonucleotide
uggauggauucggaccgaa

SEQ ID NO: 6176 - RNA, 19 nt, Artificial Sequence
  Synthetic Oligonucleotide
uggauggauuugaaccgaa

SEQ ID NO: 6177 - RNA, 19 nt, Artificial Sequence
  Synthetic Oligonucleotide
uggauggguucgaaccgaa

SEQ ID NO: 6178 - RNA, 19 nt, Artificial Sequence
  Synthetic Oligonucleotide
uggauggauucgaaccaaa

SEQ ID NO: 6179 - RNA, 19 nt, Artificial Sequence
  Synthetic Oligonucleotide
uggauggauucgaacccaa

SEQ ID NO: 6180 - RNA, 19 nt, Artificial Sequence
  Synthetic Oligonucleotide
uggauggauucgaaacgaa

SEQ ID NO: 6181 - RNA, 19 nt, Artificial Sequence
  Synthetic Oligonucleotide
uggauggauucaaaccgaa

SEQ ID NO: 6182 - RNA, 19 nt, Artificial Sequence
  Synthetic Oligonucleotide
uggauggauacgaaccgaa

SEQ ID NO: 6183 - RNA, 19 nt, Artificial Sequence
  Synthetic Oligonucleotide
uggauagauucgaaccgaa

SEQ ID NO: 6184 - RNA, 19 nt, Artificial Sequence
  Synthetic Oligonucleotide
uagauggauucgaaccgaa

SEQ ID NO: 6185 - RNA, 19 nt, Artificial Sequence
  Synthetic Oligonucleotide
uggauggauuugaaccaaa

SEQ ID NO: 6186 - RNA, 19 nt, Artificial Sequence
  Synthetic Oligonucleotide
uggauggauuuaaaccgaa

SEQ ID NO: 6187 - RNA, 19 nt, Artificial Sequence
  Synthetic Oligonucleotide
uggauggguucgaaccaaa

SEQ ID NO: 6188 - RNA, 19 nt, Artificial Sequence
  Synthetic Oligonucleotide
uagauggauucgagccgaa

SEQ ID NO: 6189 - RNA, 19 nt, Artificial Sequence
  Synthetic Oligonucleotide
uggauggauuuaauccgaa

SEQ ID NO: 6190 - RNA, 19 nt, Artificial Sequence
  Synthetic Oligonucleotide
uagauggguucgaaccaaa

SEQ ID NO: 6191 - RNA, 19 nt, Artificial Sequence
  Synthetic Oligonucleotide
uuugaagcaguaugauagu

SEQ ID NO: 6192 - RNA, 19 nt, Artificial Sequence
  Synthetic Oligonucleotide
uuugaggcaauaugauagu

SEQ ID NO: 6193 - RNA, 19 nt, Artificial Sequence
  Synthetic Oligonucleotide
uuugaagcaauaugauagc

SEQ ID NO: 6194 - RNA, 19 nt, Artificial Sequence
  Synthetic Oligonucleotide
uuugaagcaauaugauaau

SEQ ID NO: 6195 - RNA, 19 nt, Artificial Sequence
  Synthetic Oligonucleotide
uuugaagcaauaugacagu

SEQ ID NO: 6196 - RNA, 19 nt, Artificial Sequence
  Synthetic Oligonucleotide
uuugaagcaauauaauagu

SEQ ID NO: 6197 - RNA, 19 nt, Artificial Sequence
  Synthetic Oligonucleotide
uuugaagcaauauuauagu

SEQ ID NO: 6198 - RNA, 19 nt, Artificial Sequence
  Synthetic Oligonucleotide
uuugaagcaauacgauagu

SEQ ID NO: 6199 - RNA, 19 nt, Artificial Sequence
  Synthetic Oligonucleotide
uuugaaacaauaugauagu

SEQ ID NO: 6200 - RNA, 19 nt, Artificial Sequence
  Synthetic Oligonucleotide
uuuaaagcaauaugauagu

SEQ ID NO: 6201 - RNA, 19 nt, Artificial Sequence
  Synthetic Oligonucleotide
ucugaagcaauaugauagu

SEQ ID NO: 6202 - RNA, 19 nt, Artificial Sequence
  Synthetic Oligonucleotide
cuugaagcaauaugauagu

SEQ ID NO: 6203 - RNA, 19 nt, Artificial Sequence
  Synthetic Oligonucleotide
uuugaagcaauaugacagc

SEQ ID NO: 6204 - RNA, 19 nt, Artificial Sequence
  Synthetic Oligonucleotide
cuugaagcaauauuauagu

SEQ ID NO: 6205 - RNA, 19 nt, Artificial Sequence
  Synthetic Oligonucleotide
uuuaaagcaguaugacagu

SEQ ID NO: 6206 - RNA, 19 nt, Artificial Sequence
  Synthetic Oligonucleotide
uuuaaaacaauaugacagu

SEQ ID NO: 6207 - RNA, 19 nt, Artificial Sequence
  Synthetic Oligonucleotide
ggauggauucgaaccgaau

SEQ ID NO: 6208 - RNA, 19 nt, Artificial Sequence
  Synthetic Oligonucleotide
ggauggauucgaaucgaac

SEQ ID NO: 6209 - RNA, 19 nt, Artificial Sequence
  Synthetic Oligonucleotide
ggauggauucggaccgaac

SEQ ID NO: 6210 - RNA, 19 nt, Artificial Sequence
  Synthetic Oligonucleotide
ggauggauuugaaccgaac

SEQ ID NO: 6211 - RNA, 19 nt, Artificial Sequence
  Synthetic Oligonucleotide
ggauggguucgaaccgaac

SEQ ID NO: 6212 - RNA, 19 nt, Artificial Sequence
  Synthetic Oligonucleotide
ggauggauucgaaccaaac

SEQ ID NO: 6213 - RNA, 19 nt, Artificial Sequence
  Synthetic Oligonucleotide
ggauggauucgaacccaac

SEQ ID NO: 6214 - RNA, 19 nt, Artificial Sequence
  Synthetic Oligonucleotide
ggauggauucgaaacgaac

SEQ ID NO: 6215 - RNA, 19 nt, Artificial Sequence
  Synthetic Oligonucleotide
ggauggauucaaaccgaac

SEQ ID NO: 6216 - RNA, 19 nt, Artificial Sequence
  Synthetic Oligonucleotide
ggauggauacgaaccgaac

SEQ ID NO: 6217 - RNA, 19 nt, Artificial Sequence
  Synthetic Oligonucleotide
ggauagauucgaaccgaac

SEQ ID NO: 6218 - RNA, 19 nt, Artificial Sequence
  Synthetic Oligonucleotide
agauggauucgaaccgaac

SEQ ID NO: 6219 - RNA, 19 nt, Artificial Sequence
  Synthetic Oligonucleotide
ggauggauuugaaccaaac

SEQ ID NO: 6220 - RNA, 19 nt, Artificial Sequence
  Synthetic Oligonucleotide
ggauggauuuaaaccgaac

SEQ ID NO: 6221 - RNA, 19 nt, Artificial Sequence
  Synthetic Oligonucleotide
ggauggguucgaaccaaac

SEQ ID NO: 6222 - RNA, 19 nt, Artificial Sequence
  Synthetic Oligonucleotide
agauggauucgagccgaac

SEQ ID NO: 6223 - RNA, 19 nt, Artificial Sequence
  Synthetic Oligonucleotide
ggauggauuuaauccgaac

SEQ ID NO: 6224 - RNA, 19 nt, Artificial Sequence
  Synthetic Oligonucleotide
agauggguucgaaccaaac

SEQ ID NO: 6225 - RNA, 19 nt, Artificial Sequence
  Synthetic Oligonucleotide
ggauucgaaccgaacgguu

SEQ ID NO: 6226 - RNA, 19 nt, Artificial Sequence
  Synthetic Oligonucleotide
ggauucgaaccgaauggcu

SEQ ID NO: 6227 - RNA, 19 nt, Artificial Sequence
  Synthetic Oligonucleotide
ggauucgaaucgaacggcu

SEQ ID NO: 6228 - RNA, 19 nt, Artificial Sequence
  Synthetic Oligonucleotide
ggauucgagccgaacggcu

SEQ ID NO: 6229 - RNA, 19 nt, Artificial Sequence
  Synthetic Oligonucleotide
ggauucggaccgaacggcu

SEQ ID NO: 6230 - RNA, 19 nt, Artificial Sequence
  Synthetic Oligonucleotide
ggauuugaaccgaacggcu

SEQ ID NO: 6231 - RNA, 19 nt, Artificial Sequence
  Synthetic Oligonucleotide
ggguucgaaccgaacggcu

SEQ ID NO: 6232 - RNA, 19 nt, Artificial Sequence
  Synthetic Oligonucleotide
ggauucgaaccgaacggau

SEQ ID NO: 6233 - RNA, 19 nt, Artificial Sequence
  Synthetic Oligonucleotide
ggauucgaaccaaacggcu

SEQ ID NO: 6234 - RNA, 19 nt, Artificial Sequence
  Synthetic Oligonucleotide
ggauucgaacccaacggcu

SEQ ID NO: 6235 - RNA, 19 nt, Artificial Sequence
  Synthetic Oligonucleotide
ggauucgaaacgaacggcu

SEQ ID NO: 6236 - RNA, 19 nt, Artificial Sequence
  Synthetic Oligonucleotide
ggauucaaaccgaacggcu

SEQ ID NO: 6237 - RNA, 19 nt, Artificial Sequence
  Synthetic Oligonucleotide
ggauacgaaccgaacggcu

SEQ ID NO: 6238 - RNA, 19 nt, Artificial Sequence
  Synthetic Oligonucleotide
agauucgaaccgaacggcu

SEQ ID NO: 6239 - RNA, 19 nt, Artificial Sequence
  Synthetic Oligonucleotide
ggauuugaaccgaacggau

SEQ ID NO: 6240 - RNA, 19 nt, Artificial Sequence
  Synthetic Oligonucleotide
ggauuugaaccaaacggcu

SEQ ID NO: 6241 - RNA, 19 nt, Artificial Sequence
  Synthetic Oligonucleotide
ggauuuaaaccgaacggcu

SEQ ID NO: 6242 - RNA, 19 nt, Artificial Sequence
  Synthetic Oligonucleotide
ggguucgaaccaaacggcu

SEQ ID NO: 6243 - RNA, 19 nt, Artificial Sequence
  Synthetic Oligonucleotide
ggauuuaauccgaacggcu

SEQ ID NO: 6244 - RNA, 19 nt, Artificial Sequence
  Synthetic Oligonucleotide
aacauucuuuggauggaag

SEQ ID NO: 6245 - RNA, 19 nt, Artificial Sequence
  Synthetic Oligonucleotide
aacauucuuuggguggaaa

SEQ ID NO: 6246 - RNA, 19 nt, Artificial Sequence
  Synthetic Oligonucleotide
aacauuuuuuggauggaaa

SEQ ID NO: 6247 - RNA, 19 nt, Artificial Sequence
  Synthetic Oligonucleotide
aacguucuuuggauggaaa

SEQ ID NO: 6248 - RNA, 19 nt, Artificial Sequence
  Synthetic Oligonucleotide
gacauucuuuggauggaaa

SEQ ID NO: 6249 - RNA, 19 nt, Artificial Sequence
  Synthetic Oligonucleotide
aacauucuuuggguggaag

SEQ ID NO: 6250 - RNA, 19 nt, Artificial Sequence
  Synthetic Oligonucleotide
gacauucuuuggauggaag

SEQ ID NO: 6251 - RNA, 19 nt, Artificial Sequence
  Synthetic Oligonucleotide
aacauucuuugguuggaaa

SEQ ID NO: 6252 - RNA, 19 nt, Artificial Sequence
  Synthetic Oligonucleotide
aacauucuucggauggaaa

SEQ ID NO: 6253 - RNA, 19 nt, Artificial Sequence
  Synthetic Oligonucleotide
aacauucucuggauggaaa

SEQ ID NO: 6254 - RNA, 19 nt, Artificial Sequence
  Synthetic Oligonucleotide
aaaauucuuuggauggaaa

SEQ ID NO: 6255 - RNA, 19 nt, Artificial Sequence
  Synthetic Oligonucleotide
aacauucuuuggcuggaga

SEQ ID NO: 6256 - RNA, 19 nt, Artificial Sequence
  Synthetic Oligonucleotide
gacauuuuuuggcuggaaa

SEQ ID NO: 6257 - RNA, 19 nt, Artificial Sequence
  Synthetic Oligonucleotide
gacauuuuucggauggaaa

SEQ ID NO: 6258 - RNA, 19 nt, Artificial Sequence
  Synthetic Oligonucleotide
aacauucuucggcuggaga

SEQ ID NO: 6259 - RNA, 19 nt, Artificial Sequence
  Synthetic Oligonucleotide
aacauuuuucggcuggaaa

SEQ ID NO: 6260 - RNA, 19 nt, Artificial Sequence
  Synthetic Oligonucleotide
uacauuuuucggauggaaa

SEQ ID NO: 6261 - RNA, 19 nt, Artificial Sequence
  Synthetic Oligonucleotide
uggauucgaaccgaacggu

SEQ ID NO: 6262 - RNA, 19 nt, Artificial Sequence
  Synthetic Oligonucleotide
uggauucgaaccgaauggc

SEQ ID NO: 6263 - RNA, 19 nt, Artificial Sequence
  Synthetic Oligonucleotide
uggauucgaaucgaacggc

SEQ ID NO: 6264 - RNA, 19 nt, Artificial Sequence
  Synthetic Oligonucleotide
uggauucgagccgaacggc

SEQ ID NO: 6265 - RNA, 19 nt, Artificial Sequence
  Synthetic Oligonucleotide
uggauucggaccgaacggc

SEQ ID NO: 6266 - RNA, 19 nt, Artificial Sequence
  Synthetic Oligonucleotide
uggauuugaaccgaacggc

SEQ ID NO: 6267 - RNA, 19 nt, Artificial Sequence
  Synthetic Oligonucleotide
uggguucgaaccgaacggc

SEQ ID NO: 6268 - RNA, 19 nt, Artificial Sequence
  Synthetic Oligonucleotide
uggauucgaaccgaacgga

SEQ ID NO: 6269 - RNA, 19 nt, Artificial Sequence
  Synthetic Oligonucleotide
uggauucgaaccaaacggc

SEQ ID NO: 6270 - RNA, 19 nt, Artificial Sequence
  Synthetic Oligonucleotide
uggauucgaacccaacggc

SEQ ID NO: 6271 - RNA, 19 nt, Artificial Sequence
  Synthetic Oligonucleotide
uggauucgaaacgaacggc

SEQ ID NO: 6272 - RNA, 19 nt, Artificial Sequence
  Synthetic Oligonucleotide
uggauucaaaccgaacggc

SEQ ID NO: 6273 - RNA, 19 nt, Artificial Sequence
  Synthetic Oligonucleotide
uggauacgaaccgaacggc

SEQ ID NO: 6274 - RNA, 19 nt, Artificial Sequence
  Synthetic Oligonucleotide
uagauucgaaccgaacggc

SEQ ID NO: 6275 - RNA, 19 nt, Artificial Sequence
  Synthetic Oligonucleotide
uggauuugaaccgaacgga

SEQ ID NO: 6276 - RNA, 19 nt, Artificial Sequence
  Synthetic Oligonucleotide
uggauuugaaccaaacggc

SEQ ID NO: 6277 - RNA, 19 nt, Artificial Sequence
  Synthetic Oligonucleotide
uggauuuaaaccgaacggc

SEQ ID NO: 6278 - RNA, 19 nt, Artificial Sequence
  Synthetic Oligonucleotide
uggguucgaaccaaacggc

SEQ ID NO: 6279 - RNA, 19 nt, Artificial Sequence
  Synthetic Oligonucleotide
uggauuuaauccgaacggc

SEQ ID NO: 6280 - RNA, 19 nt, Artificial Sequence
  Synthetic Oligonucleotide
uaaugaaggggguauacgu

SEQ ID NO: 6281 - RNA, 19 nt, Artificial Sequence
  Synthetic Oligonucleotide
uaaugaaggggguauauau

SEQ ID NO: 6282 - RNA, 19 nt, Artificial Sequence
  Synthetic Oligonucleotide
uaaugaaggggguguacau

SEQ ID NO: 6283 - RNA, 19 nt, Artificial Sequence
  Synthetic Oligonucleotide
uagugaaggggguauacau

SEQ ID NO: 6284 - RNA, 19 nt, Artificial Sequence
  Synthetic Oligonucleotide
uaaugaaggggguacacau

SEQ ID NO: 6285 - RNA, 19 nt, Artificial Sequence
  Synthetic Oligonucleotide
uaaugaaggggguuuacau

SEQ ID NO: 6286 - RNA, 19 nt, Artificial Sequence
  Synthetic Oligonucleotide
uaaugaaggggauauacau

SEQ ID NO: 6287 - RNA, 19 nt, Artificial Sequence
  Synthetic Oligonucleotide
uaaugaagggaguauacau

SEQ ID NO: 6288 - RNA, 19 nt, Artificial Sequence
  Synthetic Oligonucleotide
uaaugaaagggguauacau

SEQ ID NO: 6289 - RNA, 19 nt, Artificial Sequence
  Synthetic Oligonucleotide
uaauaaaggggguauacau

SEQ ID NO: 6290 - RNA, 19 nt, Artificial Sequence
  Synthetic Oligonucleotide
uaaugaagggaguguacau

SEQ ID NO: 6291 - RNA, 19 nt, Artificial Sequence
  Synthetic Oligonucleotide
uaaugaagggaguguauau

SEQ ID NO: 6292 - RNA, 19 nt, Artificial Sequence
  Synthetic Oligonucleotide
uaaugaggggaguguacau

SEQ ID NO: 6293 - RNA, 19 nt, Artificial Sequence
  Synthetic Oligonucleotide
uaaugaagggagucuacau

SEQ ID NO: 6294 - RNA, 19 nt, Artificial Sequence
  Synthetic Oligonucleotide
uaaugaagggaauauacau

SEQ ID NO: 6295 - RNA, 19 nt, Artificial Sequence
  Synthetic Oligonucleotide
uaaugaagggaguguaccu

SEQ ID NO: 6296 - RNA, 19 nt, Artificial Sequence
  Synthetic Oligonucleotide
auaaugaaggggguauacg

SEQ ID NO: 6297 - RNA, 19 nt, Artificial Sequence
  Synthetic Oligonucleotide
auaaugaaggggguauaua

SEQ ID NO: 6298 - RNA, 19 nt, Artificial Sequence
  Synthetic Oligonucleotide
auaaugaaggggguguaca

SEQ ID NO: 6299 - RNA, 19 nt, Artificial Sequence
  Synthetic Oligonucleotide
auagugaaggggguauaca

SEQ ID NO: 6300 - RNA, 19 nt, Artificial Sequence
  Synthetic Oligonucleotide
auaaugaaggggguacaca

SEQ ID NO: 6301 - RNA, 19 nt, Artificial Sequence
  Synthetic Oligonucleotide
auaaugaaggggguuuaca

SEQ ID NO: 6302 - RNA, 19 nt, Artificial Sequence
  Synthetic Oligonucleotide
auaaugaaggggauauaca

SEQ ID NO: 6303 - RNA, 19 nt, Artificial Sequence
  Synthetic Oligonucleotide
auaaugaagggaguauaca

SEQ ID NO: 6304 - RNA, 19 nt, Artificial Sequence
  Synthetic Oligonucleotide
auaaugaaagggguauaca

SEQ ID NO: 6305 - RNA, 19 nt, Artificial Sequence
  Synthetic Oligonucleotide
auaauaaaggggguauaca

SEQ ID NO: 6306 - RNA, 19 nt, Artificial Sequence
  Synthetic Oligonucleotide
uuaaugaaggggguauaca

SEQ ID NO: 6307 - RNA, 19 nt, Artificial Sequence
  Synthetic Oligonucleotide
auaaugaagggaguguaca

SEQ ID NO: 6308 - RNA, 19 nt, Artificial Sequence
  Synthetic Oligonucleotide
auaaugaagggaguguaua

SEQ ID NO: 6309 - RNA, 19 nt, Artificial Sequence
  Synthetic Oligonucleotide
auaaugaggggaguguaca

SEQ ID NO: 6310 - RNA, 19 nt, Artificial Sequence
  Synthetic Oligonucleotide
auaaugaagggagucuaca

SEQ ID NO: 6311 - RNA, 19 nt, Artificial Sequence
  Synthetic Oligonucleotide
auaaugaagggaauauaca

SEQ ID NO: 6312 - RNA, 19 nt, Artificial Sequence
  Synthetic Oligonucleotide
auaaugaagggaguguacc

SEQ ID NO: 6313 - RNA, 19 nt, Artificial Sequence
  Synthetic Oligonucleotide
ucuuauuucuucggagaua

SEQ ID NO: 6314 - RNA, 19 nt, Artificial Sequence
  Synthetic Oligonucleotide
ucuuauuucuucggggaca

SEQ ID NO: 6315 - RNA, 19 nt, Artificial Sequence
  Synthetic Oligonucleotide
ucuuauuucuuuggagaca

SEQ ID NO: 6316 - RNA, 19 nt, Artificial Sequence
  Synthetic Oligonucleotide
ucuuauuucuucggggaua

SEQ ID NO: 6317 - RNA, 19 nt, Artificial Sequence
  Synthetic Oligonucleotide
aaugaagggucuuauuucu

SEQ ID NO: 6318 - RNA, 19 nt, Artificial Sequence
  Synthetic Oligonucleotide
aaugagggaucuuauuucu

SEQ ID NO: 6319 - RNA, 19 nt, Artificial Sequence
  Synthetic Oligonucleotide
aaugaggggucuuauuucu

SEQ ID NO: 6320 - RNA, 19 nt, Artificial Sequence
  Synthetic Oligonucleotide
aaugaagguucuuauuucu

SEQ ID NO: 6321 - RNA, 19 nt, Artificial Sequence
  Synthetic Oligonucleotide
aaugaaagaucuuauuucu

SEQ ID NO: 6322 - RNA, 19 nt, Artificial Sequence
  Synthetic Oligonucleotide
aacgaaggaucuuauuucu

SEQ ID NO: 6323 - RNA, 19 nt, Artificial Sequence
  Synthetic Oligonucleotide
uaugaggggucuuauuucu

SEQ ID NO: 6324 - RNA, 19 nt, Artificial Sequence
  Synthetic Oligonucleotide
aaugaaaguucuuauuucu

SEQ ID NO: 6325 - RNA, 19 nt, Artificial Sequence
  Synthetic Oligonucleotide
aaugaaggaucuuauucuc

SEQ ID NO: 6326 - RNA, 19 nt, Artificial Sequence
  Synthetic Oligonucleotide
augaagggucuuauuucuu

SEQ ID NO: 6327 - RNA, 19 nt, Artificial Sequence
  Synthetic Oligonucleotide
augagggaucuuauuucuu

SEQ ID NO: 6328 - RNA, 19 nt, Artificial Sequence
  Synthetic Oligonucleotide
augaggggucuuauuucuu

SEQ ID NO: 6329 - RNA, 19 nt, Artificial Sequence
  Synthetic Oligonucleotide
augaagguucuuauuucuu

SEQ ID NO: 6330 - RNA, 19 nt, Artificial Sequence
  Synthetic Oligonucleotide
augaaagaucuuauuucuu

SEQ ID NO: 6331 - RNA, 19 nt, Artificial Sequence
  Synthetic Oligonucleotide
acgaaggaucuuauuucuu

SEQ ID NO: 6332 - RNA, 19 nt, Artificial Sequence
  Synthetic Oligonucleotide
augaaaguucuuauuucuu

SEQ ID NO: 6333 - RNA, 19 nt, Artificial Sequence
  Synthetic Oligonucleotide
uaaugaagggucuuauuuc

SEQ ID NO: 6334 - RNA, 19 nt, Artificial Sequence
  Synthetic Oligonucleotide
uaaugagggaucuuauuuc

SEQ ID NO: 6335 - RNA, 19 nt, Artificial Sequence
  Synthetic Oligonucleotide
uaaugaggggucuuauuuc

SEQ ID NO: 6336 - RNA, 19 nt, Artificial Sequence
  Synthetic Oligonucleotide
uaaugaagguucuuauuuc

SEQ ID NO: 6337 - RNA, 19 nt, Artificial Sequence
  Synthetic Oligonucleotide
uaaugaaagaucuuauuuc

SEQ ID NO: 6338 - RNA, 19 nt, Artificial Sequence
  Synthetic Oligonucleotide
uaacgaaggaucuuauuuc

SEQ ID NO: 6339 - RNA, 19 nt, Artificial Sequence
  Synthetic Oligonucleotide
caaugaaggaucuuauuuc

SEQ ID NO: 6340 - RNA, 19 nt, Artificial Sequence
  Synthetic Oligonucleotide
uaaugaaggaucuuauucu

SEQ ID NO: 6341 - RNA, 19 nt, Artificial Sequence
  Synthetic Oligonucleotide
uuaugaggggucuuauuuc

SEQ ID NO: 6342 - RNA, 19 nt, Artificial Sequence
  Synthetic Oligonucleotide
uaaugaaaguucuuauuuc

SEQ ID NO: 6343 - RNA, 19 nt, Artificial Sequence
  Synthetic Oligonucleotide
uuauuucuucggagacagu

SEQ ID NO: 6344 - RNA, 19 nt, Artificial Sequence
  Synthetic Oligonucleotide
uuauuucuucggagauaau

SEQ ID NO: 6345 - RNA, 19 nt, Artificial Sequence
  Synthetic Oligonucleotide
uuauuucuucggggacaau

SEQ ID NO: 6346 - RNA, 19 nt, Artificial Sequence
  Synthetic Oligonucleotide
uuauuucuuuggagacaau

SEQ ID NO: 6347 - RNA, 19 nt, Artificial Sequence
  Synthetic Oligonucleotide
uuauuucuucggggauaau

SEQ ID NO: 6348 - RNA, 19 nt, Artificial Sequence
  Synthetic Oligonucleotide
cuuauuucuucggagacag

SEQ ID NO: 6349 - RNA, 19 nt, Artificial Sequence
  Synthetic Oligonucleotide
cuuauuucuucggagauaa

SEQ ID NO: 6350 - RNA, 19 nt, Artificial Sequence
  Synthetic Oligonucleotide
cuuauuucuucggggacaa

SEQ ID NO: 6351 - RNA, 19 nt, Artificial Sequence
  Synthetic Oligonucleotide
cuuauuucuuuggagacaa

SEQ ID NO: 6352 - RNA, 19 nt, Artificial Sequence
  Synthetic Oligonucleotide
cuuauuucuucggggauaa

SEQ ID NO: 6353 - RNA, 19 nt, Artificial Sequence
  Synthetic Oligonucleotide
auuucuucggagacagugc

SEQ ID NO: 6354 - RNA, 19 nt, Artificial Sequence
  Synthetic Oligonucleotide
auuucuucggagauaaugc

SEQ ID NO: 6355 - RNA, 19 nt, Artificial Sequence
  Synthetic Oligonucleotide
auuucuucggggacaaugc

SEQ ID NO: 6356 - RNA, 19 nt, Artificial Sequence
  Synthetic Oligonucleotide
auuucuuuggagacaaugc

SEQ ID NO: 6357 - RNA, 19 nt, Artificial Sequence
  Synthetic Oligonucleotide
auuucuucggggauaaugc

SEQ ID NO: 6358 - RNA, 19 nt, Artificial Sequence
  Synthetic Oligonucleotide
uauuucuucggagacagug

SEQ ID NO: 6359 - RNA, 19 nt, Artificial Sequence
  Synthetic Oligonucleotide
uauuucuucggagauaaug

SEQ ID NO: 6360 - RNA, 19 nt, Artificial Sequence
  Synthetic Oligonucleotide
uauuucuucggggacaaug

SEQ ID NO: 6361 - RNA, 19 nt, Artificial Sequence
  Synthetic Oligonucleotide
uauuucuuuggagacaaug

SEQ ID NO: 6362 - RNA, 19 nt, Artificial Sequence
  Synthetic Oligonucleotide
uauuucuucggggauaaug

SEQ ID NO: 6363 - RNA, 19 nt, Artificial Sequence
  Synthetic Oligonucleotide
uuucuucggagacagugca

SEQ ID NO: 6364 - RNA, 19 nt, Artificial Sequence
  Synthetic Oligonucleotide
uuucuucggagauaaugca

SEQ ID NO: 6365 - RNA, 19 nt, Artificial Sequence
  Synthetic Oligonucleotide
uuucuucggggacaaugca

SEQ ID NO: 6366 - RNA, 19 nt, Artificial Sequence
  Synthetic Oligonucleotide
uuucuuuggagacaaugca

SEQ ID NO: 6367 - RNA, 19 nt, Artificial Sequence
  Synthetic Oligonucleotide
uuucuucggggauaaugca

SEQ ID NO: 6368 - RNA, 19 nt, Artificial Sequence
  Synthetic Oligonucleotide
uuucuucggagacaaugcu

SEQ ID NO: 6369 - RNA, 19 nt, Artificial Sequence
  Synthetic Oligonucleotide
ugaaggaucuuauuucuuu

SEQ ID NO: 6370 - RNA, 19 nt, Artificial Sequence
  Synthetic Oligonucleotide
ugaagggucuuauuucuuc

SEQ ID NO: 6371 - RNA, 19 nt, Artificial Sequence
  Synthetic Oligonucleotide
ugagggaucuuauuucuuc

SEQ ID NO: 6372 - RNA, 19 nt, Artificial Sequence
  Synthetic Oligonucleotide
ugaggggucuuauuucuuc

SEQ ID NO: 6373 - RNA, 19 nt, Artificial Sequence
  Synthetic Oligonucleotide
ugaagguucuuauuucuuc

SEQ ID NO: 6374 - RNA, 19 nt, Artificial Sequence
  Synthetic Oligonucleotide
ugaaagaucuuauuucuuc

SEQ ID NO: 6375 - RNA, 19 nt, Artificial Sequence
  Synthetic Oligonucleotide
cgaaggaucuuauuucuuc

SEQ ID NO: 6376 - RNA, 19 nt, Artificial Sequence
  Synthetic Oligonucleotide
ugaaaguucuuauuucuuc

SEQ ID NO: 6377 - RNA, 19 nt, Artificial Sequence
  Synthetic Oligonucleotide
gaaggaucuuauuucuuug

SEQ ID NO: 6378 - RNA, 19 nt, Artificial Sequence
  Synthetic Oligonucleotide
gaagggucuuauuucuucg

SEQ ID NO: 6379 - RNA, 19 nt, Artificial Sequence
  Synthetic Oligonucleotide
gagggaucuuauuucuucg

SEQ ID NO: 6380 - RNA, 19 nt, Artificial Sequence
  Synthetic Oligonucleotide
gaggggucuuauuucuucg

SEQ ID NO: 6381 - RNA, 19 nt, Artificial Sequence
  Synthetic Oligonucleotide
gaagguucuuauuucuucg

SEQ ID NO: 6382 - RNA, 19 nt, Artificial Sequence
  Synthetic Oligonucleotide
gaaagaucuuauuucuucg

SEQ ID NO: 6383 - RNA, 19 nt, Artificial Sequence
  Synthetic Oligonucleotide
gaaaguucuuauuucuucg

SEQ ID NO: 6384 - RNA, 19 nt, Artificial Sequence
  Synthetic Oligonucleotide
aaggaucuuauuucuuugg

SEQ ID NO: 6385 - RNA, 19 nt, Artificial Sequence
  Synthetic Oligonucleotide
aagggucuuauuucuucgg

SEQ ID NO: 6386 - RNA, 19 nt, Artificial Sequence
  Synthetic Oligonucleotide
agggaucuuauuucuucgg

SEQ ID NO: 6387 - RNA, 19 nt, Artificial Sequence
  Synthetic Oligonucleotide
aggggucuuauuucuucgg

SEQ ID NO: 6388 - RNA, 19 nt, Artificial Sequence
  Synthetic Oligonucleotide
aagguucuuauuucuucgg

SEQ ID NO: 6389 - RNA, 19 nt, Artificial Sequence
  Synthetic Oligonucleotide
aaagaucuuauuucuucgg

SEQ ID NO: 6390 - RNA, 19 nt, Artificial Sequence
  Synthetic Oligonucleotide
aaaguucuuauuucuucgg

SEQ ID NO: 6391 - RNA, 19 nt, Artificial Sequence
  Synthetic Oligonucleotide
uucuucggagacagugcag

SEQ ID NO: 6392 - RNA, 19 nt, Artificial Sequence
  Synthetic Oligonucleotide
uucuucggagauaaugcag

SEQ ID NO: 6393 - RNA, 19 nt, Artificial Sequence
  Synthetic Oligonucleotide
uucuucggggacaaugcag

SEQ ID NO: 6394 - RNA, 19 nt, Artificial Sequence
  Synthetic Oligonucleotide
uucuuuggagacaaugcag

SEQ ID NO: 6395 - RNA, 19 nt, Artificial Sequence
  Synthetic Oligonucleotide
uucuucggggauaaugcag

SEQ ID NO: 6396 - RNA, 19 nt, Artificial Sequence
  Synthetic Oligonucleotide
uucuucggagacaaugcaa

SEQ ID NO: 6397 - RNA, 19 nt, Artificial Sequence
  Synthetic Oligonucleotide
uucuucggagacaaugcug

SEQ ID NO: 6398 - RNA, 19 nt, Artificial Sequence
  Synthetic Oligonucleotide
ucuucggagacagugcaga

SEQ ID NO: 6399 - RNA, 19 nt, Artificial Sequence
  Synthetic Oligonucleotide
ucuucggagauaaugcaga

SEQ ID NO: 6400 - RNA, 19 nt, Artificial Sequence
  Synthetic Oligonucleotide
ucuucggggacaaugcaga

SEQ ID NO: 6401 - RNA, 19 nt, Artificial Sequence
  Synthetic Oligonucleotide
ucuuuggagacaaugcaga

SEQ ID NO: 6402 - RNA, 19 nt, Artificial Sequence
  Synthetic Oligonucleotide
ucuucggggauaaugcaga

SEQ ID NO: 6403 - RNA, 19 nt, Artificial Sequence
  Synthetic Oligonucleotide
ucuucggagacaaugcaaa

SEQ ID NO: 6404 - RNA, 19 nt, Artificial Sequence
  Synthetic Oligonucleotide
ucuucggagacaaugcuga

SEQ ID NO: 6405 - RNA, 19 nt, Artificial Sequence
  Synthetic Oligonucleotide
aggaucuuauuucuucggg

SEQ ID NO: 6406 - RNA, 19 nt, Artificial Sequence
  Synthetic Oligonucleotide
aggaucuuauuucuuugga

SEQ ID NO: 6407 - RNA, 19 nt, Artificial Sequence
  Synthetic Oligonucleotide
agggucuuauuucuucgga

SEQ ID NO: 6408 - RNA, 19 nt, Artificial Sequence
  Synthetic Oligonucleotide
gggaucuuauuucuucgga

SEQ ID NO: 6409 - RNA, 19 nt, Artificial Sequence
  Synthetic Oligonucleotide
ggggucuuauuucuucgga

SEQ ID NO: 6410 - RNA, 19 nt, Artificial Sequence
  Synthetic Oligonucleotide
agguucuuauuucuucgga

SEQ ID NO: 6411 - RNA, 19 nt, Artificial Sequence
  Synthetic Oligonucleotide
aagaucuuauuucuucgga

SEQ ID NO: 6412 - RNA, 19 nt, Artificial Sequence
  Synthetic Oligonucleotide
aaguucuuauuucuucgga

SEQ ID NO: 6413 - RNA, 19 nt, Artificial Sequence
  Synthetic Oligonucleotide
gaucuuauuucuucgggga

SEQ ID NO: 6414 - RNA, 19 nt, Artificial Sequence
  Synthetic Oligonucleotide
gaucuuauuucuuuggaga

SEQ ID NO: 6415 - RNA, 19 nt, Artificial Sequence
  Synthetic Oligonucleotide
ggucuuauuucuucggaga

SEQ ID NO: 6416 - RNA, 19 nt, Artificial Sequence
  Synthetic Oligonucleotide
guucuuauuucuucggaga

SEQ ID NO: 6417 - RNA, 19 nt, Artificial Sequence
  Synthetic Oligonucleotide
ggaucuuauuucuucgggg

SEQ ID NO: 6418 - RNA, 19 nt, Artificial Sequence
  Synthetic Oligonucleotide
ggaucuuauuucuuuggag

SEQ ID NO: 6419 - RNA, 19 nt, Artificial Sequence
  Synthetic Oligonucleotide
gggucuuauuucuucggag

SEQ ID NO: 6420 - RNA, 19 nt, Artificial Sequence
  Synthetic Oligonucleotide
ggaucuuauuucuucggaa

SEQ ID NO: 6421 - RNA, 19 nt, Artificial Sequence
  Synthetic Oligonucleotide
gguucuuauuucuucggag

SEQ ID NO: 6422 - RNA, 19 nt, Artificial Sequence
  Synthetic Oligonucleotide
agaucuuauuucuucggag

SEQ ID NO: 6423 - RNA, 19 nt, Artificial Sequence
  Synthetic Oligonucleotide
aguucuuauuucuucggag

SEQ ID NO: 6424 - RNA, 19 nt, Artificial Sequence
  Synthetic Oligonucleotide
aucuuauuucuucggagau

SEQ ID NO: 6425 - RNA, 19 nt, Artificial Sequence
  Synthetic Oligonucleotide
aucuuauuucuucggggac

SEQ ID NO: 6426 - RNA, 19 nt, Artificial Sequence
  Synthetic Oligonucleotide
aucuuauuucuuuggagac

SEQ ID NO: 6427 - RNA, 19 nt, Artificial Sequence
  Synthetic Oligonucleotide
gucuuauuucuucggagac

SEQ ID NO: 6428 - RNA, 19 nt, Artificial Sequence
  Synthetic Oligonucleotide
aucuuauuucuucggggau

SEQ ID NO: 6429 - RNA, 19 nt, Artificial Sequence
  Synthetic Oligonucleotide
uucuuauuucuucggagac

SEQ ID NO: 6430 - RNA, 19 nt, Artificial Sequence
  Synthetic Oligonucleotide
aguaaugaagggucuuauu

SEQ ID NO: 6431 - RNA, 19 nt, Artificial Sequence
  Synthetic Oligonucleotide
aguaaugagggaucuuauu

SEQ ID NO: 6432 - RNA, 19 nt, Artificial Sequence
  Synthetic Oligonucleotide
aguaaugaagguucuuauu

SEQ ID NO: 6433 - RNA, 19 nt, Artificial Sequence
  Synthetic Oligonucleotide
aguaaugaaagaucuuauu

SEQ ID NO: 6434 - RNA, 19 nt, Artificial Sequence
  Synthetic Oligonucleotide
aguaacgaaggaucuuauu

SEQ ID NO: 6435 - RNA, 19 nt, Artificial Sequence
  Synthetic Oligonucleotide
agcaaugaaggaucuuauu

SEQ ID NO: 6436 - RNA, 19 nt, Artificial Sequence
  Synthetic Oligonucleotide
aauaaugaaggaucuuauu

SEQ ID NO: 6437 - RNA, 19 nt, Artificial Sequence
  Synthetic Oligonucleotide
aauaaugaagggucuuauu

SEQ ID NO: 6438 - RNA, 19 nt, Artificial Sequence
  Synthetic Oligonucleotide
aauaaugaggggucuuauu

SEQ ID NO: 6439 - RNA, 19 nt, Artificial Sequence
  Synthetic Oligonucleotide
aguaaugaaaguucuuauu

SEQ ID NO: 6440 - RNA, 19 nt, Artificial Sequence
  Synthetic Oligonucleotide
aauuaugaggggucuuauu

SEQ ID NO: 6441 - RNA, 19 nt, Artificial Sequence
  Synthetic Oligonucleotide
guaaugaagggucuuauuu

SEQ ID NO: 6442 - RNA, 19 nt, Artificial Sequence
  Synthetic Oligonucleotide
guaaugagggaucuuauuu

SEQ ID NO: 6443 - RNA, 19 nt, Artificial Sequence
  Synthetic Oligonucleotide
guaaugaagguucuuauuu

SEQ ID NO: 6444 - RNA, 19 nt, Artificial Sequence
  Synthetic Oligonucleotide
guaaugaaagaucuuauuu

SEQ ID NO: 6445 - RNA, 19 nt, Artificial Sequence
  Synthetic Oligonucleotide
guaacgaaggaucuuauuu

SEQ ID NO: 6446 - RNA, 19 nt, Artificial Sequence
  Synthetic Oligonucleotide
gcaaugaaggaucuuauuu

SEQ ID NO: 6447 - RNA, 19 nt, Artificial Sequence
  Synthetic Oligonucleotide
auaaugaaggaucuuauuu

SEQ ID NO: 6448 - RNA, 19 nt, Artificial Sequence
  Synthetic Oligonucleotide
auaaugaagggucuuauuu

SEQ ID NO: 6449 - RNA, 19 nt, Artificial Sequence
  Synthetic Oligonucleotide
auaaugaggggucuuauuu

SEQ ID NO: 6450 - RNA, 19 nt, Artificial Sequence
  Synthetic Oligonucleotide
guaaugaaaguucuuauuu

SEQ ID NO: 6451 - RNA, 19 nt, Artificial Sequence
  Synthetic Oligonucleotide
auaaugaaggaucuuauuc

SEQ ID NO: 6452 - RNA, 19 nt, Artificial Sequence
  Synthetic Oligonucleotide
auuaugaggggucuuauuu

SEQ ID NO: 6453 - RNA, 19 nt, Artificial Sequence
  Synthetic Oligonucleotide
auggugcuuucugcuuuug

SEQ ID NO: 6454 - RNA, 19 nt, Artificial Sequence
  Synthetic Oligonucleotide
auggugcucucugcuuucg

SEQ ID NO: 6455 - RNA, 19 nt, Artificial Sequence
  Synthetic Oligonucleotide
auggugcucucugccuuug

SEQ ID NO: 6456 - RNA, 19 nt, Artificial Sequence
  Synthetic Oligonucleotide
auggugcucucugcguuug

SEQ ID NO: 6457 - RNA, 19 nt, Artificial Sequence
  Synthetic Oligonucleotide
auggugcucucagcuuuug

SEQ ID NO: 6458 - RNA, 19 nt, Artificial Sequence
  Synthetic Oligonucleotide
auggugcucuccgcuuuug

SEQ ID NO: 6459 - RNA, 19 nt, Artificial Sequence
  Synthetic Oligonucleotide
auggugcuaucugcuuuug

SEQ ID NO: 6460 - RNA, 19 nt, Artificial Sequence
  Synthetic Oligonucleotide
augguacucucugcuuuug

SEQ ID NO: 6461 - RNA, 19 nt, Artificial Sequence
  Synthetic Oligonucleotide
augguacucucugcauuug

SEQ ID NO: 6462 - RNA, 19 nt, Artificial Sequence
  Synthetic Oligonucleotide
augguccucucugcauuug

SEQ ID NO: 6463 - RNA, 19 nt, Artificial Sequence
  Synthetic Oligonucleotide
augguucucucugcauuug

SEQ ID NO: 6464 - RNA, 19 nt, Artificial Sequence
  Synthetic Oligonucleotide
augguucucucugccuuug

SEQ ID NO: 6465 - RNA, 19 nt, Artificial Sequence
  Synthetic Oligonucleotide
augguacucucugcauucg

SEQ ID NO: 6466 - RNA, 19 nt, Artificial Sequence
  Synthetic Oligonucleotide
augguacucuccgcauuug

SEQ ID NO: 6467 - RNA, 19 nt, Artificial Sequence
  Synthetic Oligonucleotide
augguacuaucugcauuug

SEQ ID NO: 6468 - RNA, 19 nt, Artificial Sequence
  Synthetic Oligonucleotide
augguucucucagcauuug

SEQ ID NO: 6469 - RNA, 19 nt, Artificial Sequence
  Synthetic Oligonucleotide
augguucucuccgcauuug

SEQ ID NO: 6470 - RNA, 19 nt, Artificial Sequence
  Synthetic Oligonucleotide
ugaguaaugaagggucuua

SEQ ID NO: 6471 - RNA, 19 nt, Artificial Sequence
  Synthetic Oligonucleotide
ugaguaaugagggaucuua

SEQ ID NO: 6472 - RNA, 19 nt, Artificial Sequence
  Synthetic Oligonucleotide
ugaguaaugaagguucuua

SEQ ID NO: 6473 - RNA, 19 nt, Artificial Sequence
  Synthetic Oligonucleotide
ugaguaaugaaagaucuua

SEQ ID NO: 6474 - RNA, 19 nt, Artificial Sequence
  Synthetic Oligonucleotide
ugaguaacgaaggaucuua

SEQ ID NO: 6475 - RNA, 19 nt, Artificial Sequence
  Synthetic Oligonucleotide
ugagcaaugaaggaucuua

SEQ ID NO: 6476 - RNA, 19 nt, Artificial Sequence
  Synthetic Oligonucleotide
ugaauaaugaaggaucuua

SEQ ID NO: 6477 - RNA, 19 nt, Artificial Sequence
  Synthetic Oligonucleotide
uaaguaaugaaggaucuua

SEQ ID NO: 6478 - RNA, 19 nt, Artificial Sequence
  Synthetic Oligonucleotide
ugaauaaugaagggucuua

SEQ ID NO: 6479 - RNA, 19 nt, Artificial Sequence
  Synthetic Oligonucleotide
ugaauaaugaggggucuua

SEQ ID NO: 6480 - RNA, 19 nt, Artificial Sequence
  Synthetic Oligonucleotide
ugaguaaugaaaguucuua

SEQ ID NO: 6481 - RNA, 19 nt, Artificial Sequence
  Synthetic Oligonucleotide
ugaauuaugaggggucuua

SEQ ID NO: 6482 - RNA, 19 nt, Artificial Sequence
  Synthetic Oligonucleotide
uggugcuuucugcuuuuga

SEQ ID NO: 6483 - RNA, 19 nt, Artificial Sequence
  Synthetic Oligonucleotide
uggugcucucugcuuucga

SEQ ID NO: 6484 - RNA, 19 nt, Artificial Sequence
  Synthetic Oligonucleotide
uggugcucucugccuuuga

SEQ ID NO: 6485 - RNA, 19 nt, Artificial Sequence
  Synthetic Oligonucleotide
uggugcucucugcguuuga

SEQ ID NO: 6486 - RNA, 19 nt, Artificial Sequence
  Synthetic Oligonucleotide
uggugcucucagcuuuuga

SEQ ID NO: 6487 - RNA, 19 nt, Artificial Sequence
  Synthetic Oligonucleotide
uggugcucuccgcuuuuga

SEQ ID NO: 6488 - RNA, 19 nt, Artificial Sequence
  Synthetic Oligonucleotide
uggugcuaucugcuuuuga

SEQ ID NO: 6489 - RNA, 19 nt, Artificial Sequence
  Synthetic Oligonucleotide
ugguacucucugcuuuuga

SEQ ID NO: 6490 - RNA, 19 nt, Artificial Sequence
  Synthetic Oligonucleotide
ugguacucucugcauuuga

SEQ ID NO: 6491 - RNA, 19 nt, Artificial Sequence
  Synthetic Oligonucleotide
ugguccucucugcauuuga

SEQ ID NO: 6492 - RNA, 19 nt, Artificial Sequence
  Synthetic Oligonucleotide
ugguucucucugcauuuga

SEQ ID NO: 6493 - RNA, 19 nt, Artificial Sequence
  Synthetic Oligonucleotide
ugguucucucugccuuuga

SEQ ID NO: 6494 - RNA, 19 nt, Artificial Sequence
  Synthetic Oligonucleotide
ugguacucucugcauucga

SEQ ID NO: 6495 - RNA, 19 nt, Artificial Sequence
  Synthetic Oligonucleotide
ugguacucuccgcauuuga

SEQ ID NO: 6496 - RNA, 19 nt, Artificial Sequence
  Synthetic Oligonucleotide
ugguacuaucugcauuuga

SEQ ID NO: 6497 - RNA, 19 nt, Artificial Sequence
  Synthetic Oligonucleotide
ugguucucucagcauuuga

SEQ ID NO: 6498 - RNA, 19 nt, Artificial Sequence
  Synthetic Oligonucleotide
ugguucucuccgcauuuga

SEQ ID NO: 6499 - RNA, 19 nt, Artificial Sequence
  Synthetic Oligonucleotide
gaguaaugaagggucuuau

SEQ ID NO: 6500 - RNA, 19 nt, Artificial Sequence
  Synthetic Oligonucleotide
gaguaaugagggaucuuau

SEQ ID NO: 6501 - RNA, 19 nt, Artificial Sequence
  Synthetic Oligonucleotide
gaguaaugaagguucuuau

SEQ ID NO: 6502 - RNA, 19 nt, Artificial Sequence
  Synthetic Oligonucleotide
gaguaaugaaagaucuuau

SEQ ID NO: 6503 - RNA, 19 nt, Artificial Sequence
  Synthetic Oligonucleotide
gaguaacgaaggaucuuau

SEQ ID NO: 6504 - RNA, 19 nt, Artificial Sequence
  Synthetic Oligonucleotide
gagcaaugaaggaucuuau

SEQ ID NO: 6505 - RNA, 19 nt, Artificial Sequence
  Synthetic Oligonucleotide
gaauaaugaaggaucuuau

SEQ ID NO: 6506 - RNA, 19 nt, Artificial Sequence
  Synthetic Oligonucleotide
aaguaaugaaggaucuuau

SEQ ID NO: 6507 - RNA, 19 nt, Artificial Sequence
  Synthetic Oligonucleotide
gaauaaugaagggucuuau

SEQ ID NO: 6508 - RNA, 19 nt, Artificial Sequence
  Synthetic Oligonucleotide
gaauaaugaggggucuuau

SEQ ID NO: 6509 - RNA, 19 nt, Artificial Sequence
  Synthetic Oligonucleotide
gaguaaugaaaguucuuau

SEQ ID NO: 6510 - RNA, 19 nt, Artificial Sequence
  Synthetic Oligonucleotide
gaauuaugaggggucuuau

SEQ ID NO: 6511 - RNA, 19 nt, Artificial Sequence
  Synthetic Oligonucleotide
augaguaaugaagggucuu

SEQ ID NO: 6512 - RNA, 19 nt, Artificial Sequence
  Synthetic Oligonucleotide
augaguaaugagggaucuu

SEQ ID NO: 6513 - RNA, 19 nt, Artificial Sequence
  Synthetic Oligonucleotide
augaguaaugaagguucuu

SEQ ID NO: 6514 - RNA, 19 nt, Artificial Sequence
  Synthetic Oligonucleotide
augaguaaugaaagaucuu

SEQ ID NO: 6515 - RNA, 19 nt, Artificial Sequence
  Synthetic Oligonucleotide
augaguaacgaaggaucuu

SEQ ID NO: 6516 - RNA, 19 nt, Artificial Sequence
  Synthetic Oligonucleotide
augagcaaugaaggaucuu

SEQ ID NO: 6517 - RNA, 19 nt, Artificial Sequence
  Synthetic Oligonucleotide
augaauaaugaaggaucuu

SEQ ID NO: 6518 - RNA, 19 nt, Artificial Sequence
  Synthetic Oligonucleotide
auaaguaaugaaggaucuu

SEQ ID NO: 6519 - RNA, 19 nt, Artificial Sequence
  Synthetic Oligonucleotide
augaauaaugaagggucuu

SEQ ID NO: 6520 - RNA, 19 nt, Artificial Sequence
  Synthetic Oligonucleotide
augaauaaugaggggucuu

SEQ ID NO: 6521 - RNA, 19 nt, Artificial Sequence
  Synthetic Oligonucleotide
augaguaaugaaaguucuu

SEQ ID NO: 6522 - RNA, 19 nt, Artificial Sequence
  Synthetic Oligonucleotide
augaauuaugaggggucuu

SEQ ID NO: 6523 - RNA, 19 nt, Artificial Sequence
  Synthetic Oligonucleotide
aaauuucaaacagcugcgc

SEQ ID NO: 6524 - RNA, 19 nt, Artificial Sequence
  Synthetic Oligonucleotide
aaauuucaaacggcugcac

SEQ ID NO: 6525 - RNA, 19 nt, Artificial Sequence
  Synthetic Oligonucleotide
aaauuucaaauagcugcac

SEQ ID NO: 6526 - RNA, 19 nt, Artificial Sequence
  Synthetic Oligonucleotide
aaauuucaagcagcugcac

SEQ ID NO: 6527 - RNA, 19 nt, Artificial Sequence
  Synthetic Oligonucleotide
aaauuucagacagcugcac

SEQ ID NO: 6528 - RNA, 19 nt, Artificial Sequence
  Synthetic Oligonucleotide
aaguuucaaacagcugcac

SEQ ID NO: 6529 - RNA, 19 nt, Artificial Sequence
  Synthetic Oligonucleotide
aaauuucaaacagcugcuc

SEQ ID NO: 6530 - RNA, 19 nt, Artificial Sequence
  Synthetic Oligonucleotide
aaauuucaaacagcagcac

SEQ ID NO: 6531 - RNA, 19 nt, Artificial Sequence
  Synthetic Oligonucleotide
aaauuucaaacaccugcac

SEQ ID NO: 6532 - RNA, 19 nt, Artificial Sequence
  Synthetic Oligonucleotide
aaauuucaaacugcugcac

SEQ ID NO: 6533 - RNA, 19 nt, Artificial Sequence
  Synthetic Oligonucleotide
aaauuccaaacagcugcac

SEQ ID NO: 6534 - RNA, 19 nt, Artificial Sequence
  Synthetic Oligonucleotide
aaacuucaaacagcugcac

SEQ ID NO: 6535 - RNA, 19 nt, Artificial Sequence
  Synthetic Oligonucleotide
aaauuucaaacggcagcac

SEQ ID NO: 6536 - RNA, 19 nt, Artificial Sequence
  Synthetic Oligonucleotide
aaauuucagacagcugccc

SEQ ID NO: 6537 - RNA, 19 nt, Artificial Sequence
  Synthetic Oligonucleotide
aaguuucaaacagcggcac

SEQ ID NO: 6538 - RNA, 19 nt, Artificial Sequence
  Synthetic Oligonucleotide
aaauuucagacagcagcgc

SEQ ID NO: 6539 - RNA, 19 nt, Artificial Sequence
  Synthetic Oligonucleotide
aaguuucagacagcugccc

SEQ ID NO: 6540 - RNA, 19 nt, Artificial Sequence
  Synthetic Oligonucleotide
aaauuccaaacagcagcac

SEQ ID NO: 6541 - RNA, 19 nt, Artificial Sequence
  Synthetic Oligonucleotide
aaauuucagaccgcagcac

SEQ ID NO: 6542 - RNA, 19 nt, Artificial Sequence
  Synthetic Oligonucleotide
aaacuccaaacagcagcac

SEQ ID NO: 6543 - RNA, 19 nt, Artificial Sequence
  Synthetic Oligonucleotide
aauuucaaacagcugcgca

SEQ ID NO: 6544 - RNA, 19 nt, Artificial Sequence
  Synthetic Oligonucleotide
aauuucaaacggcugcaca

SEQ ID NO: 6545 - RNA, 19 nt, Artificial Sequence
  Synthetic Oligonucleotide
aauuucaaauagcugcaca

SEQ ID NO: 6546 - RNA, 19 nt, Artificial Sequence
  Synthetic Oligonucleotide
aauuucaagcagcugcaca

SEQ ID NO: 6547 - RNA, 19 nt, Artificial Sequence
  Synthetic Oligonucleotide
aauuucagacagcugcaca

SEQ ID NO: 6548 - RNA, 19 nt, Artificial Sequence
  Synthetic Oligonucleotide
aguuucaaacagcugcaca

SEQ ID NO: 6549 - RNA, 19 nt, Artificial Sequence
  Synthetic Oligonucleotide
aauuucaaacagcugcacc

SEQ ID NO: 6550 - RNA, 19 nt, Artificial Sequence
  Synthetic Oligonucleotide
aauuucaaacagcugcuca

SEQ ID NO: 6551 - RNA, 19 nt, Artificial Sequence
  Synthetic Oligonucleotide
aauuucaaacagcagcaca

SEQ ID NO: 6552 - RNA, 19 nt, Artificial Sequence
  Synthetic Oligonucleotide
aauuucaaacaccugcaca

SEQ ID NO: 6553 - RNA, 19 nt, Artificial Sequence
  Synthetic Oligonucleotide
aauuucaaacugcugcaca

SEQ ID NO: 6554 - RNA, 19 nt, Artificial Sequence
  Synthetic Oligonucleotide
aauuccaaacagcugcaca

SEQ ID NO: 6555 - RNA, 19 nt, Artificial Sequence
  Synthetic Oligonucleotide
aacuucaaacagcugcaca

SEQ ID NO: 6556 - RNA, 19 nt, Artificial Sequence
  Synthetic Oligonucleotide
aauuucaaacggcagcaca

SEQ ID NO: 6557 - RNA, 19 nt, Artificial Sequence
  Synthetic Oligonucleotide
aauuucagacagcugccca

SEQ ID NO: 6558 - RNA, 19 nt, Artificial Sequence
  Synthetic Oligonucleotide
aguuucaaacagcggcaca

SEQ ID NO: 6559 - RNA, 19 nt, Artificial Sequence
  Synthetic Oligonucleotide
aauuucagacagcagcgca

SEQ ID NO: 6560 - RNA, 19 nt, Artificial Sequence
  Synthetic Oligonucleotide
aguuucagacagcugccca

SEQ ID NO: 6561 - RNA, 19 nt, Artificial Sequence
  Synthetic Oligonucleotide
aauuccaaacagcagcaca

SEQ ID NO: 6562 - RNA, 19 nt, Artificial Sequence
  Synthetic Oligonucleotide
aauuucagaccgcagcaca

SEQ ID NO: 6563 - RNA, 19 nt, Artificial Sequence
  Synthetic Oligonucleotide
aacuccaaacagcagcaca

SEQ ID NO: 6564 - RNA, 19 nt, Artificial Sequence
  Synthetic Oligonucleotide
uacaaguugcuucaaauga

SEQ ID NO: 6565 - RNA, 19 nt, Artificial Sequence
  Synthetic Oligonucleotide
uacagauugcuucaaauga

SEQ ID NO: 6566 - RNA, 19 nt, Artificial Sequence
  Synthetic Oligonucleotide
ugcaaauugcuucaaauga

SEQ ID NO: 6567 - RNA, 19 nt, Artificial Sequence
  Synthetic Oligonucleotide
uacaaauugcuucaaacga

SEQ ID NO: 6568 - RNA, 19 nt, Artificial Sequence
  Synthetic Oligonucleotide
uacaaauugcuuccaauga

SEQ ID NO: 6569 - RNA, 19 nt, Artificial Sequence
  Synthetic Oligonucleotide
uacaaauugccucaaauga

SEQ ID NO: 6570 - RNA, 19 nt, Artificial Sequence
  Synthetic Oligonucleotide
uacaaauwgcuucaaauga

SEQ ID NO: 6571 - RNA, 19 nt, Artificial Sequence
  Synthetic Oligonucleotide
uucaaauugcuucaaauga

SEQ ID NO: 6572 - RNA, 19 nt, Artificial Sequence
  Synthetic Oligonucleotide
cacaaauugcuucaaauga

SEQ ID NO: 6573 - RNA, 19 nt, Artificial Sequence
  Synthetic Oligonucleotide
uucaaauugcuucaaguga

SEQ ID NO: 6574 - RNA, 19 nt, Artificial Sequence
  Synthetic Oligonucleotide
uucagauugcuucaaauga

SEQ ID NO: 6575 - RNA, 19 nt, Artificial Sequence
  Synthetic Oligonucleotide
uucaaauugcuuccaauga

SEQ ID NO: 6576 - RNA, 19 nt, Artificial Sequence
  Synthetic Oligonucleotide
uucaaauugccucaaauga

SEQ ID NO: 6577 - RNA, 19 nt, Artificial Sequence
  Synthetic Oligonucleotide
uucaaauagcuucaaauga

SEQ ID NO: 6578 - RNA, 19 nt, Artificial Sequence
  Synthetic Oligonucleotide
uucagauugcuuccaauga

SEQ ID NO: 6579 - RNA, 19 nt, Artificial Sequence
  Synthetic Oligonucleotide
uucagauugcgucaaauga

SEQ ID NO: 6580 - RNA, 19 nt, Artificial Sequence
  Synthetic Oligonucleotide
auuucaaacagcugcacag

SEQ ID NO: 6581 - RNA, 19 nt, Artificial Sequence
  Synthetic Oligonucleotide
auuucaaacagcugcgcaa

SEQ ID NO: 6582 - RNA, 19 nt, Artificial Sequence
  Synthetic Oligonucleotide
auuucaaacggcugcacaa

SEQ ID NO: 6583 - RNA, 19 nt, Artificial Sequence
  Synthetic Oligonucleotide
auuucaaauagcugcacaa

SEQ ID NO: 6584 - RNA, 19 nt, Artificial Sequence
  Synthetic Oligonucleotide
auuucaagcagcugcacaa

SEQ ID NO: 6585 - RNA, 19 nt, Artificial Sequence
  Synthetic Oligonucleotide
auuucagacagcugcacaa

SEQ ID NO: 6586 - RNA, 19 nt, Artificial Sequence
  Synthetic Oligonucleotide
guuucaaacagcugcacaa

SEQ ID NO: 6587 - RNA, 19 nt, Artificial Sequence
  Synthetic Oligonucleotide
auuucagacagcugcacag

SEQ ID NO: 6588 - RNA, 19 nt, Artificial Sequence
  Synthetic Oligonucleotide
auuucaaacagcugcacca

SEQ ID NO: 6589 - RNA, 19 nt, Artificial Sequence
  Synthetic Oligonucleotide
auuucaaacagcugcucaa

SEQ ID NO: 6590 - RNA, 19 nt, Artificial Sequence
  Synthetic Oligonucleotide
auuucaaacagcagcacaa

SEQ ID NO: 6591 - RNA, 19 nt, Artificial Sequence
  Synthetic Oligonucleotide
auuucaaacaccugcacaa

SEQ ID NO: 6592 - RNA, 19 nt, Artificial Sequence
  Synthetic Oligonucleotide
auuucaaacugcugcacaa

SEQ ID NO: 6593 - RNA, 19 nt, Artificial Sequence
  Synthetic Oligonucleotide
auuccaaacagcugcacaa

SEQ ID NO: 6594 - RNA, 19 nt, Artificial Sequence
  Synthetic Oligonucleotide
acuucaaacagcugcacaa

SEQ ID NO: 6595 - RNA, 19 nt, Artificial Sequence
  Synthetic Oligonucleotide
auuucaaacggcagcacaa

SEQ ID NO: 6596 - RNA, 19 nt, Artificial Sequence
  Synthetic Oligonucleotide
guuucaaacagcggcacaa

SEQ ID NO: 6597 - RNA, 19 nt, Artificial Sequence
  Synthetic Oligonucleotide
auuucagacagcugcccag

SEQ ID NO: 6598 - RNA, 19 nt, Artificial Sequence
  Synthetic Oligonucleotide
auuucagacagcagcgcaa

SEQ ID NO: 6599 - RNA, 19 nt, Artificial Sequence
  Synthetic Oligonucleotide
auuccaaacagcagcacaa

SEQ ID NO: 6600 - RNA, 19 nt, Artificial Sequence
  Synthetic Oligonucleotide
auuucagaccgcagcacaa

SEQ ID NO: 6601 - RNA, 19 nt, Artificial Sequence
  Synthetic Oligonucleotide
acuccaaacagcagcacaa

SEQ ID NO: 6602 - RNA, 19 nt, Artificial Sequence
  Synthetic Oligonucleotide
uuucaaacagcugcacaga

SEQ ID NO: 6603 - RNA, 19 nt, Artificial Sequence
  Synthetic Oligonucleotide
uuucaaacagcugcgcaaa

SEQ ID NO: 6604 - RNA, 19 nt, Artificial Sequence
  Synthetic Oligonucleotide
uuucaaacggcugcacaaa

SEQ ID NO: 6605 - RNA, 19 nt, Artificial Sequence
  Synthetic Oligonucleotide
uuucaaauagcugcacaaa

SEQ ID NO: 6606 - RNA, 19 nt, Artificial Sequence
  Synthetic Oligonucleotide
uuucaagcagcugcacaaa

SEQ ID NO: 6607 - RNA, 19 nt, Artificial Sequence
  Synthetic Oligonucleotide
uuucagacagcugcacaaa

SEQ ID NO: 6608 - RNA, 19 nt, Artificial Sequence
  Synthetic Oligonucleotide
uuucagacagcugcacaga

SEQ ID NO: 6609 - RNA, 19 nt, Artificial Sequence
  Synthetic Oligonucleotide
uuucaaacagcugcacaac

SEQ ID NO: 6610 - RNA, 19 nt, Artificial Sequence
  Synthetic Oligonucleotide
uuucaaacagcugcaccaa

SEQ ID NO: 6611 - RNA, 19 nt, Artificial Sequence
  Synthetic Oligonucleotide
uuucaaacagcugcucaaa

SEQ ID NO: 6612 - RNA, 19 nt, Artificial Sequence
  Synthetic Oligonucleotide
uuucaaacagcagcacaaa

SEQ ID NO: 6613 - RNA, 19 nt, Artificial Sequence
  Synthetic Oligonucleotide
uuucaaacagcggcacaaa

SEQ ID NO: 6614 - RNA, 19 nt, Artificial Sequence
  Synthetic Oligonucleotide
uuucaaacaccugcacaaa

SEQ ID NO: 6615 - RNA, 19 nt, Artificial Sequence
  Synthetic Oligonucleotide
uuucaaacugcugcacaaa

SEQ ID NO: 6616 - RNA, 19 nt, Artificial Sequence
  Synthetic Oligonucleotide
uuccaaacagcugcacaaa

SEQ ID NO: 6617 - RNA, 19 nt, Artificial Sequence
  Synthetic Oligonucleotide
cuucaaacagcugcacaaa

SEQ ID NO: 6618 - RNA, 19 nt, Artificial Sequence
  Synthetic Oligonucleotide
uuucaaacggcagcacaaa

SEQ ID NO: 6619 - RNA, 19 nt, Artificial Sequence
  Synthetic Oligonucleotide
uuucagacagcugcccaga

SEQ ID NO: 6620 - RNA, 19 nt, Artificial Sequence
  Synthetic Oligonucleotide
uuucagacagcagcgcaaa

SEQ ID NO: 6621 - RNA, 19 nt, Artificial Sequence
  Synthetic Oligonucleotide
uuucaaacagcagcacaac

SEQ ID NO: 6622 - RNA, 19 nt, Artificial Sequence
  Synthetic Oligonucleotide
uuccaaacagcagcacaaa

SEQ ID NO: 6623 - RNA, 19 nt, Artificial Sequence
  Synthetic Oligonucleotide
uuccaaacagcagcacaac

SEQ ID NO: 6624 - RNA, 19 nt, Artificial Sequence
  Synthetic Oligonucleotide
cuccaaacagcagcacaaa

SEQ ID NO: 6625 - RNA, 19 nt, Artificial Sequence
  Synthetic Oligonucleotide
aauggugcuuucugcuuuu

SEQ ID NO: 6626 - RNA, 19 nt, Artificial Sequence
  Synthetic Oligonucleotide
gauggugcucucugcuuuu

SEQ ID NO: 6627 - RNA, 19 nt, Artificial Sequence
  Synthetic Oligonucleotide
aauggugcucucugcuuuc

SEQ ID NO: 6628 - RNA, 19 nt, Artificial Sequence
  Synthetic Oligonucleotide
aauggugcucucugccuuu

SEQ ID NO: 6629 - RNA, 19 nt, Artificial Sequence
  Synthetic Oligonucleotide
aauggugcucucugcguuu

SEQ ID NO: 6630 - RNA, 19 nt, Artificial Sequence
  Synthetic Oligonucleotide
aauggugcucucagcuuuu

SEQ ID NO: 6631 - RNA, 19 nt, Artificial Sequence
  Synthetic Oligonucleotide
aauggugcucuccgcuuuu

SEQ ID NO: 6632 - RNA, 19 nt, Artificial Sequence
  Synthetic Oligonucleotide
aauggugcuaucugcuuuu

SEQ ID NO: 6633 - RNA, 19 nt, Artificial Sequence
  Synthetic Oligonucleotide
aaugguacucucugcuuuu

SEQ ID NO: 6634 - RNA, 19 nt, Artificial Sequence
  Synthetic Oligonucleotide
aaugguacucucugcauuu

SEQ ID NO: 6635 - RNA, 19 nt, Artificial Sequence
  Synthetic Oligonucleotide
aaugguccucucugcauuu

SEQ ID NO: 6636 - RNA, 19 nt, Artificial Sequence
  Synthetic Oligonucleotide
aaugguucucucugcauuu

SEQ ID NO: 6637 - RNA, 19 nt, Artificial Sequence
  Synthetic Oligonucleotide
aaugguucucucugccuuu

SEQ ID NO: 6638 - RNA, 19 nt, Artificial Sequence
  Synthetic Oligonucleotide
aaugguacucucugcauuc

SEQ ID NO: 6639 - RNA, 19 nt, Artificial Sequence
  Synthetic Oligonucleotide
aaugguacucuccgcauuu

SEQ ID NO: 6640 - RNA, 19 nt, Artificial Sequence
  Synthetic Oligonucleotide
aaugguacuaucugcauuu

SEQ ID NO: 6641 - RNA, 19 nt, Artificial Sequence
  Synthetic Oligonucleotide
aaugguucucucagcauuu

SEQ ID NO: 6642 - RNA, 19 nt, Artificial Sequence
  Synthetic Oligonucleotide
aaugguucucuccgcauuu

SEQ ID NO: 6643 - RNA, 19 nt, Artificial Sequence
  Synthetic Oligonucleotide
aaggcaccaaacgguuuua

SEQ ID NO: 6644 - RNA, 19 nt, Artificial Sequence
  Synthetic Oligonucleotide
aagguaccaaacggucuua

SEQ ID NO: 6645 - RNA, 19 nt, Artificial Sequence
  Synthetic Oligonucleotide
agggcaccaaacggucuua

SEQ ID NO: 6646 - RNA, 19 nt, Artificial Sequence
  Synthetic Oligonucleotide
aaggcaccaaacggucaua

SEQ ID NO: 6647 - RNA, 19 nt, Artificial Sequence
  Synthetic Oligonucleotide
aaggcaccaaacgaucuua

SEQ ID NO: 6648 - RNA, 19 nt, Artificial Sequence
  Synthetic Oligonucleotide
aaggcaccaaaaggucuua

SEQ ID NO: 6649 - RNA, 19 nt, Artificial Sequence
  Synthetic Oligonucleotide
aaggcaccacacggucuua

SEQ ID NO: 6650 - RNA, 19 nt, Artificial Sequence
  Synthetic Oligonucleotide
aaggcaacaaacggucuua

SEQ ID NO: 6651 - RNA, 19 nt, Artificial Sequence
  Synthetic Oligonucleotide
auggcaccaaacggucuua

SEQ ID NO: 6652 - RNA, 19 nt, Artificial Sequence
  Synthetic Oligonucleotide
agugcaccgaacggucuua

SEQ ID NO: 6653 - RNA, 19 nt, Artificial Sequence
  Synthetic Oligonucleotide
aaggcaccaaacgaucaua

SEQ ID NO: 6654 - RNA, 19 nt, Artificial Sequence
  Synthetic Oligonucleotide
aaggcaccaaacgauccua

SEQ ID NO: 6655 - RNA, 19 nt, Artificial Sequence
  Synthetic Oligonucleotide
guggcauugggagguuuua

SEQ ID NO: 6656 - RNA, 19 nt, Artificial Sequence
  Synthetic Oligonucleotide
caaggcaccaaacgguuuu

SEQ ID NO: 6657 - RNA, 19 nt, Artificial Sequence
  Synthetic Oligonucleotide
caagguaccaaacggucuu

SEQ ID NO: 6658 - RNA, 19 nt, Artificial Sequence
  Synthetic Oligonucleotide
cagggcaccaaacggucuu

SEQ ID NO: 6659 - RNA, 19 nt, Artificial Sequence
  Synthetic Oligonucleotide
caaggcaccaaacggucau

SEQ ID NO: 6660 - RNA, 19 nt, Artificial Sequence
  Synthetic Oligonucleotide
caaggcaccaaacgaucuu

SEQ ID NO: 6661 - RNA, 19 nt, Artificial Sequence
  Synthetic Oligonucleotide
caaggcaccaaaaggucuu

SEQ ID NO: 6662 - RNA, 19 nt, Artificial Sequence
  Synthetic Oligonucleotide
caaggcaccacacggucuu

SEQ ID NO: 6663 - RNA, 19 nt, Artificial Sequence
  Synthetic Oligonucleotide
caaggcaacaaacggucuu

SEQ ID NO: 6664 - RNA, 19 nt, Artificial Sequence
  Synthetic Oligonucleotide
cauggcaccaaacggucuu

SEQ ID NO: 6665 - RNA, 19 nt, Artificial Sequence
  Synthetic Oligonucleotide
cagugcaccgaacggucuu

SEQ ID NO: 6666 - RNA, 19 nt, Artificial Sequence
  Synthetic Oligonucleotide
caaggcaccaaacgaucau

SEQ ID NO: 6667 - RNA, 19 nt, Artificial Sequence
  Synthetic Oligonucleotide
caaggcaccaaacgauccu

SEQ ID NO: 6668 - RNA, 19 nt, Artificial Sequence
  Synthetic Oligonucleotide
aaaggcaccaaacgaucuu

SEQ ID NO: 6669 - RNA, 19 nt, Artificial Sequence
  Synthetic Oligonucleotide
cgaacccgaucgugccuuc

SEQ ID NO: 6670 - RNA, 19 nt, Artificial Sequence
  Synthetic Oligonucleotide
cgaacccggucgugcccuc

SEQ ID NO: 6671 - RNA, 19 nt, Artificial Sequence
  Synthetic Oligonucleotide
cgagcccgaucgugcccuc

SEQ ID NO: 6672 - RNA, 19 nt, Artificial Sequence
  Synthetic Oligonucleotide
cgagcccgaucgugccuuc

SEQ ID NO: 6673 - RNA, 19 nt, Artificial Sequence
  Synthetic Oligonucleotide
cgaacccgaucguacccuc

SEQ ID NO: 6674 - RNA, 19 nt, Artificial Sequence
  Synthetic Oligonucleotide
cgaacccgaucguucccuc

SEQ ID NO: 6675 - RNA, 19 nt, Artificial Sequence
  Synthetic Oligonucleotide
cgaacccaaucgugcccuc

SEQ ID NO: 6676 - RNA, 19 nt, Artificial Sequence
  Synthetic Oligonucleotide
cgaaccccaucgugcccuc

SEQ ID NO: 6677 - RNA, 19 nt, Artificial Sequence
  Synthetic Oligonucleotide
cgaacccuaucgugcccuc

SEQ ID NO: 6678 - RNA, 19 nt, Artificial Sequence
  Synthetic Oligonucleotide
guacaaguugcuucaaaug

SEQ ID NO: 6679 - RNA, 19 nt, Artificial Sequence
  Synthetic Oligonucleotide
guacagauugcuucaaaug

SEQ ID NO: 6680 - RNA, 19 nt, Artificial Sequence
  Synthetic Oligonucleotide
gugcaaauugcuucaaaug

SEQ ID NO: 6681 - RNA, 19 nt, Artificial Sequence
  Synthetic Oligonucleotide
guacaaauugcuucaaacg

SEQ ID NO: 6682 - RNA, 19 nt, Artificial Sequence
  Synthetic Oligonucleotide
guacaaauugcuuccaaug

SEQ ID NO: 6683 - RNA, 19 nt, Artificial Sequence
  Synthetic Oligonucleotide
guacaaauugccucaaaug

SEQ ID NO: 6684 - RNA, 19 nt, Artificial Sequence
  Synthetic Oligonucleotide
guacaaauwgcuucaaaug

SEQ ID NO: 6685 - RNA, 19 nt, Artificial Sequence
  Synthetic Oligonucleotide
guucaaauugcuucaaaug

SEQ ID NO: 6686 - RNA, 19 nt, Artificial Sequence
  Synthetic Oligonucleotide
gcacaaauugcuucaaaug

SEQ ID NO: 6687 - RNA, 19 nt, Artificial Sequence
  Synthetic Oligonucleotide
auacaaauugcuucaaaug

SEQ ID NO: 6688 - RNA, 19 nt, Artificial Sequence
  Synthetic Oligonucleotide
guucaaauugcuucaagug

SEQ ID NO: 6689 - RNA, 19 nt, Artificial Sequence
  Synthetic Oligonucleotide
guucagauugcuucaaaug

SEQ ID NO: 6690 - RNA, 19 nt, Artificial Sequence
  Synthetic Oligonucleotide
guucaaauugcuuccaaug

SEQ ID NO: 6691 - RNA, 19 nt, Artificial Sequence
  Synthetic Oligonucleotide
guucaaauugccucaaaug

SEQ ID NO: 6692 - RNA, 19 nt, Artificial Sequence
  Synthetic Oligonucleotide
guucaaauagcuucaaaug

SEQ ID NO: 6693 - RNA, 19 nt, Artificial Sequence
  Synthetic Oligonucleotide
auucaaauugcuucaaaug

SEQ ID NO: 6694 - RNA, 19 nt, Artificial Sequence
  Synthetic Oligonucleotide
guucagauugcuuccaaug

SEQ ID NO: 6695 - RNA, 19 nt, Artificial Sequence
  Synthetic Oligonucleotide
guucagauugcgucaaaug

SEQ ID NO: 6696 - RNA, 19 nt, Artificial Sequence
  Synthetic Oligonucleotide
auucagauugcuucaaaug

SEQ ID NO: 6697 - RNA, 19 nt, Artificial Sequence
  Synthetic Oligonucleotide
caacgaacccggucgugcc

SEQ ID NO: 6698 - RNA, 19 nt, Artificial Sequence
  Synthetic Oligonucleotide
caacgagcccgaucgugcc

SEQ ID NO: 6699 - RNA, 19 nt, Artificial Sequence
  Synthetic Oligonucleotide
cagcgaacccgaucgugcc

SEQ ID NO: 6700 - RNA, 19 nt, Artificial Sequence
  Synthetic Oligonucleotide
cgacgaacccgaucgugcc

SEQ ID NO: 6701 - RNA, 19 nt, Artificial Sequence
  Synthetic Oligonucleotide
cagcgagcccgaucgugcc

SEQ ID NO: 6702 - RNA, 19 nt, Artificial Sequence
  Synthetic Oligonucleotide
caacgaacccgaucguacc

SEQ ID NO: 6703 - RNA, 19 nt, Artificial Sequence
  Synthetic Oligonucleotide
caacgaacccgaucguucc

SEQ ID NO: 6704 - RNA, 19 nt, Artificial Sequence
  Synthetic Oligonucleotide
caacgaacccaaucgugcc

SEQ ID NO: 6705 - RNA, 19 nt, Artificial Sequence
  Synthetic Oligonucleotide
caacgaaccccaucgugcc

SEQ ID NO: 6706 - RNA, 19 nt, Artificial Sequence
  Synthetic Oligonucleotide
caacgaacccuaucgugcc

SEQ ID NO: 6707 - RNA, 19 nt, Artificial Sequence
  Synthetic Oligonucleotide
caccgaacccgaucgugcc

SEQ ID NO: 6708 - RNA, 19 nt, Artificial Sequence
  Synthetic Oligonucleotide
gcaacgaacccggucgugc

SEQ ID NO: 6709 - RNA, 19 nt, Artificial Sequence
  Synthetic Oligonucleotide
gcaacgagcccgaucgugc

SEQ ID NO: 6710 - RNA, 19 nt, Artificial Sequence
  Synthetic Oligonucleotide
gcagcgaacccgaucgugc

SEQ ID NO: 6711 - RNA, 19 nt, Artificial Sequence
  Synthetic Oligonucleotide
gcgacgaacccgaucgugc

SEQ ID NO: 6712 - RNA, 19 nt, Artificial Sequence
  Synthetic Oligonucleotide
gcagcgagcccgaucgugc

SEQ ID NO: 6713 - RNA, 19 nt, Artificial Sequence
  Synthetic Oligonucleotide
gcaacgaacccgaucguac

SEQ ID NO: 6714 - RNA, 19 nt, Artificial Sequence
  Synthetic Oligonucleotide
gcaacgaacccgaucguuc

SEQ ID NO: 6715 - RNA, 19 nt, Artificial Sequence
  Synthetic Oligonucleotide
gcaacgaacccaaucgugc

SEQ ID NO: 6716 - RNA, 19 nt, Artificial Sequence
  Synthetic Oligonucleotide
gcaacgaaccccaucgugc

SEQ ID NO: 6717 - RNA, 19 nt, Artificial Sequence
  Synthetic Oligonucleotide
gcaacgaacccuaucgugc

SEQ ID NO: 6718 - RNA, 19 nt, Artificial Sequence
  Synthetic Oligonucleotide
gcaccgaacccgaucgugc

SEQ ID NO: 6719 - RNA, 19 nt, Artificial Sequence
  Synthetic Oligonucleotide
gauucuacauccagaugug

SEQ ID NO: 6720 - RNA, 19 nt, Artificial Sequence
  Synthetic Oligonucleotide
gauucuacauucaaaugug

SEQ ID NO: 6721 - RNA, 19 nt, Artificial Sequence
  Synthetic Oligonucleotide
gauucuauauccaaaugug

SEQ ID NO: 6722 - RNA, 19 nt, Artificial Sequence
  Synthetic Oligonucleotide
gauuuuacauccaaaugug

SEQ ID NO: 6723 - RNA, 19 nt, Artificial Sequence
  Synthetic Oligonucleotide
gguucuacauccaaaugug

SEQ ID NO: 6724 - RNA, 19 nt, Artificial Sequence
  Synthetic Oligonucleotide
aauucuacauccaaaugug

SEQ ID NO: 6725 - RNA, 19 nt, Artificial Sequence
  Synthetic Oligonucleotide
gauucuacauacagaugug

SEQ ID NO: 6726 - RNA, 19 nt, Artificial Sequence
  Synthetic Oligonucleotide
gguucuacauacagaugug

SEQ ID NO: 6727 - RNA, 19 nt, Artificial Sequence
  Synthetic Oligonucleotide
aauucuacauacaaaugug

SEQ ID NO: 6728 - RNA, 19 nt, Artificial Sequence
  Synthetic Oligonucleotide
ggcaacgaacccggucgug

SEQ ID NO: 6729 - RNA, 19 nt, Artificial Sequence
  Synthetic Oligonucleotide
ggcaacgagcccgaucgug

SEQ ID NO: 6730 - RNA, 19 nt, Artificial Sequence
  Synthetic Oligonucleotide
ggcagcgaacccgaucgug

SEQ ID NO: 6731 - RNA, 19 nt, Artificial Sequence
  Synthetic Oligonucleotide
ggcgacgaacccgaucgug

SEQ ID NO: 6732 - RNA, 19 nt, Artificial Sequence
  Synthetic Oligonucleotide
ggcagcgagcccgaucgug

SEQ ID NO: 6733 - RNA, 19 nt, Artificial Sequence
  Synthetic Oligonucleotide
ggcaacgaacccgaucgua

SEQ ID NO: 6734 - RNA, 19 nt, Artificial Sequence
  Synthetic Oligonucleotide
ggcaacgaacccgaucguu

SEQ ID NO: 6735 - RNA, 19 nt, Artificial Sequence
  Synthetic Oligonucleotide
ggcaacgaacccaaucgug

SEQ ID NO: 6736 - RNA, 19 nt, Artificial Sequence
  Synthetic Oligonucleotide
ggcaacgaaccccaucgug

SEQ ID NO: 6737 - RNA, 19 nt, Artificial Sequence
  Synthetic Oligonucleotide
ggcaacgaacccuaucgug

SEQ ID NO: 6738 - RNA, 19 nt, Artificial Sequence
  Synthetic Oligonucleotide
ggcaccgaacccgaucgug

SEQ ID NO: 6739 - RNA, 19 nt, Artificial Sequence
  Synthetic Oligonucleotide
agcaacgaacccgaucgug

SEQ ID NO: 6740 - RNA, 19 nt, Artificial Sequence
  Synthetic Oligonucleotide
agcagcgaacccgaucgug

SEQ ID NO: 6741 - RNA, 19 nt, Artificial Sequence
  Synthetic Oligonucleotide
uggaucaagugagagagag

SEQ ID NO: 6742 - RNA, 19 nt, Artificial Sequence
  Synthetic Oligonucleotide
uggaucaagugagggaaag

SEQ ID NO: 6743 - RNA, 19 nt, Artificial Sequence
  Synthetic Oligonucleotide
uggaucaggugagagaaag

SEQ ID NO: 6744 - RNA, 19 nt, Artificial Sequence
  Synthetic Oligonucleotide
uggaucaaguaagagaaag

SEQ ID NO: 6745 - RNA, 19 nt, Artificial Sequence
  Synthetic Oligonucleotide
uggauccagugagagaaag

SEQ ID NO: 6746 - RNA, 19 nt, Artificial Sequence
  Synthetic Oligonucleotide
uggaccaagugagagaaag

SEQ ID NO: 6747 - RNA, 19 nt, Artificial Sequence
  Synthetic Oligonucleotide
uagaucaagugagagaaag

SEQ ID NO: 6748 - RNA, 19 nt, Artificial Sequence
  Synthetic Oligonucleotide
uggaucaagugcgagagag

SEQ ID NO: 6749 - RNA, 19 nt, Artificial Sequence
  Synthetic Oligonucleotide
uggaucaaguaagagagag

SEQ ID NO: 6750 - RNA, 19 nt, Artificial Sequence
  Synthetic Oligonucleotide
uggaucaggugcgagaaag

SEQ ID NO: 6751 - RNA, 19 nt, Artificial Sequence
  Synthetic Oligonucleotide
uggaucaagugcgggagag

SEQ ID NO: 6752 - RNA, 19 nt, Artificial Sequence
  Synthetic Oligonucleotide
uggaucaggugcgagagag

SEQ ID NO: 6753 - RNA, 19 nt, Artificial Sequence
  Synthetic Oligonucleotide
uggaccaggugagggaaag

SEQ ID NO: 6754 - RNA, 19 nt, Artificial Sequence
  Synthetic Oligonucleotide
uggaucawgugcgagagag

SEQ ID NO: 6755 - RNA, 19 nt, Artificial Sequence
  Synthetic Oligonucleotide
uggaccaagugcgagagag

SEQ ID NO: 6756 - RNA, 19 nt, Artificial Sequence
  Synthetic Oligonucleotide
uggaccaggugcgagaaag

SEQ ID NO: 6757 - RNA, 19 nt, Artificial Sequence
  Synthetic Oligonucleotide
uggaccaggugcgagagag

SEQ ID NO: 6758 - RNA, 19 nt, Artificial Sequence
  Synthetic Oligonucleotide
uggaccaggugcgggaaag

SEQ ID NO: 6759 - RNA, 19 nt, Artificial Sequence
  Synthetic Oligonucleotide
ucauggcagcauucauugg

SEQ ID NO: 6760 - RNA, 19 nt, Artificial Sequence
  Synthetic Oligonucleotide
ucauggcagcauucgcugg

SEQ ID NO: 6761 - RNA, 19 nt, Artificial Sequence
  Synthetic Oligonucleotide
ucauggcagcauuuacugg

SEQ ID NO: 6762 - RNA, 19 nt, Artificial Sequence
  Synthetic Oligonucleotide
ucauggcagcguucacugg

SEQ ID NO: 6763 - RNA, 19 nt, Artificial Sequence
  Synthetic Oligonucleotide
uuauggcagcauucacugg

SEQ ID NO: 6764 - RNA, 19 nt, Artificial Sequence
  Synthetic Oligonucleotide
ucauggcagcauucacagg

SEQ ID NO: 6765 - RNA, 19 nt, Artificial Sequence
  Synthetic Oligonucleotide
ucauggcagcauucaccgg

SEQ ID NO: 6766 - RNA, 19 nt, Artificial Sequence
  Synthetic Oligonucleotide
ucauggcagcauucaaugg

SEQ ID NO: 6767 - RNA, 19 nt, Artificial Sequence
  Synthetic Oligonucleotide
ucauggcagcuuucacugg

SEQ ID NO: 6768 - RNA, 19 nt, Artificial Sequence
  Synthetic Oligonucleotide
ucauggcugcauucacugg

SEQ ID NO: 6769 - RNA, 19 nt, Artificial Sequence
  Synthetic Oligonucleotide
uaauggcagcauucacugg

SEQ ID NO: 6770 - RNA, 19 nt, Artificial Sequence
  Synthetic Oligonucleotide
ucauggcagcauuuacagg

SEQ ID NO: 6771 - RNA, 19 nt, Artificial Sequence
  Synthetic Oligonucleotide
uuauggcagcauucacagg

SEQ ID NO: 6772 - RNA, 19 nt, Artificial Sequence
  Synthetic Oligonucleotide
uuauggcagcauucaaugg

SEQ ID NO: 6773 - RNA, 19 nt, Artificial Sequence
  Synthetic Oligonucleotide
uuauggcagcauucagugg

SEQ ID NO: 6774 - RNA, 19 nt, Artificial Sequence
  Synthetic Oligonucleotide
ucauggcaguauuuacagg

SEQ ID NO: 6775 - RNA, 19 nt, Artificial Sequence
  Synthetic Oligonucleotide
uuauggcagcauuuacagg

SEQ ID NO: 6776 - RNA, 19 nt, Artificial Sequence
  Synthetic Oligonucleotide
uuauggcagcguucacagg

SEQ ID NO: 6777 - RNA, 19 nt, Artificial Sequence
  Synthetic Oligonucleotide
uuauggcagcuuucauugg

SEQ ID NO: 6778 - RNA, 19 nt, Artificial Sequence
  Synthetic Oligonucleotide
uuauggcagcuuucgcugg

SEQ ID NO: 6779 - RNA, 19 nt, Artificial Sequence
  Synthetic Oligonucleotide
ucauggcggccuucacagg

SEQ ID NO: 6780 - RNA, 19 nt, Artificial Sequence
  Synthetic Oligonucleotide
ucauugcagcauuuacagg

SEQ ID NO: 6781 - RNA, 19 nt, Artificial Sequence
  Synthetic Oligonucleotide
uuauggcaacauuuacagg

SEQ ID NO: 6782 - RNA, 19 nt, Artificial Sequence
  Synthetic Oligonucleotide
ucagacaugagggcagaga

SEQ ID NO: 6783 - RNA, 19 nt, Artificial Sequence
  Synthetic Oligonucleotide
ucagacaugagggcggaaa

SEQ ID NO: 6784 - RNA, 19 nt, Artificial Sequence
  Synthetic Oligonucleotide
ucagauaugagggcagaaa

SEQ ID NO: 6785 - RNA, 19 nt, Artificial Sequence
  Synthetic Oligonucleotide
ucggacaugagggcagaaa

SEQ ID NO: 6786 - RNA, 19 nt, Artificial Sequence
  Synthetic Oligonucleotide
ucagacaugagggcugaaa

SEQ ID NO: 6787 - RNA, 19 nt, Artificial Sequence
  Synthetic Oligonucleotide
ucagacaugagagcagaaa

SEQ ID NO: 6788 - RNA, 19 nt, Artificial Sequence
  Synthetic Oligonucleotide
ucugacaugagggcagaaa

SEQ ID NO: 6789 - RNA, 19 nt, Artificial Sequence
  Synthetic Oligonucleotide
ucagacaugagaacagaaa

SEQ ID NO: 6790 - RNA, 19 nt, Artificial Sequence
  Synthetic Oligonucleotide
ucugacaugaggacagaaa

SEQ ID NO: 6791 - RNA, 19 nt, Artificial Sequence
  Synthetic Oligonucleotide
uccgacaugaggacugaaa

SEQ ID NO: 6792 - RNA, 19 nt, Artificial Sequence
  Synthetic Oligonucleotide
ucugacaugaggaccgaaa

SEQ ID NO: 6793 - RNA, 19 nt, Artificial Sequence
  Synthetic Oligonucleotide
ucugacaugaggacugaaa

SEQ ID NO: 6794 - RNA, 19 nt, Artificial Sequence
  Synthetic Oligonucleotide
ucugacaugagaacagaaa

SEQ ID NO: 6795 - RNA, 19 nt, Artificial Sequence
  Synthetic Oligonucleotide
cagacaugagggcagagau

SEQ ID NO: 6796 - RNA, 19 nt, Artificial Sequence
  Synthetic Oligonucleotide
cagacaugagggcggaaau

SEQ ID NO: 6797 - RNA, 19 nt, Artificial Sequence
  Synthetic Oligonucleotide
cagauaugagggcagaaau

SEQ ID NO: 6798 - RNA, 19 nt, Artificial Sequence
  Synthetic Oligonucleotide
cggacaugagggcagaaau

SEQ ID NO: 6799 - RNA, 19 nt, Artificial Sequence
  Synthetic Oligonucleotide
cagacaugagggcugaaau

SEQ ID NO: 6800 - RNA, 19 nt, Artificial Sequence
  Synthetic Oligonucleotide
cagacaugagagcagaaau

SEQ ID NO: 6801 - RNA, 19 nt, Artificial Sequence
  Synthetic Oligonucleotide
cugacaugagggcagaaau

SEQ ID NO: 6802 - RNA, 19 nt, Artificial Sequence
  Synthetic Oligonucleotide
cagacaugagaacagaaau

SEQ ID NO: 6803 - RNA, 19 nt, Artificial Sequence
  Synthetic Oligonucleotide
cugacaugaggacagaaau

SEQ ID NO: 6804 - RNA, 19 nt, Artificial Sequence
  Synthetic Oligonucleotide
ccgacaugaggacugaaau

SEQ ID NO: 6805 - RNA, 19 nt, Artificial Sequence
  Synthetic Oligonucleotide
cugacaugaggaccgaaau

SEQ ID NO: 6806 - RNA, 19 nt, Artificial Sequence
  Synthetic Oligonucleotide
cugacaugaggacugaaau

SEQ ID NO: 6807 - RNA, 19 nt, Artificial Sequence
  Synthetic Oligonucleotide
cugacaugagaacagaaau

SEQ ID NO: 6808 - RNA, 19 nt, Artificial Sequence
  Synthetic Oligonucleotide
aaugcugagauugaagauc

SEQ ID NO: 6809 - RNA, 19 nt, Artificial Sequence
  Synthetic Oligonucleotide
aaugcugagaucgaagacc

SEQ ID NO: 6810 - RNA, 19 nt, Artificial Sequence
  Synthetic Oligonucleotide
aaugcugagauagaagauc

SEQ ID NO: 6811 - RNA, 19 nt, Artificial Sequence
  Synthetic Oligonucleotide
aaugcugaguucgaagauc

SEQ ID NO: 6812 - RNA, 19 nt, Artificial Sequence
  Synthetic Oligonucleotide
aaugcugaaaucgaagauc

SEQ ID NO: 6813 - RNA, 19 nt, Artificial Sequence
  Synthetic Oligonucleotide
aauacugagaucgaagauc

SEQ ID NO: 6814 - RNA, 19 nt, Artificial Sequence
  Synthetic Oligonucleotide
aacgcugagaucgaagauc

SEQ ID NO: 6815 - RNA, 19 nt, Artificial Sequence
  Synthetic Oligonucleotide
aaugcugagauugaagacc

SEQ ID NO: 6816 - RNA, 19 nt, Artificial Sequence
  Synthetic Oligonucleotide
aaugcugaaauugaagauc

SEQ ID NO: 6817 - RNA, 19 nt, Artificial Sequence
  Synthetic Oligonucleotide
aacgcugagauugaagauc

SEQ ID NO: 6818 - RNA, 19 nt, Artificial Sequence
  Synthetic Oligonucleotide
aaugcugagcucgaagacc

SEQ ID NO: 6819 - RNA, 19 nt, Artificial Sequence
  Synthetic Oligonucleotide
aaugcugaguacgaagauc

SEQ ID NO: 6820 - RNA, 19 nt, Artificial Sequence
  Synthetic Oligonucleotide
aaugccgagaucgaagacc

SEQ ID NO: 6821 - RNA, 19 nt, Artificial Sequence
  Synthetic Oligonucleotide
aacgcugaaauugaagauc

SEQ ID NO: 6822 - RNA, 19 nt, Artificial Sequence
  Synthetic Oligonucleotide
aaugcugaagaugaagauc

SEQ ID NO: 6823 - RNA, 19 nt, Artificial Sequence
  Synthetic Oligonucleotide
augcugagauugaagaucu

SEQ ID NO: 6824 - RNA, 19 nt, Artificial Sequence
  Synthetic Oligonucleotide
augcugagaucgaagaccu

SEQ ID NO: 6825 - RNA, 19 nt, Artificial Sequence
  Synthetic Oligonucleotide
augcugagauagaagaucu

SEQ ID NO: 6826 - RNA, 19 nt, Artificial Sequence
  Synthetic Oligonucleotide
augcugaguucgaagaucu

SEQ ID NO: 6827 - RNA, 19 nt, Artificial Sequence
  Synthetic Oligonucleotide
augcugaaaucgaagaucu

SEQ ID NO: 6828 - RNA, 19 nt, Artificial Sequence
  Synthetic Oligonucleotide
auacugagaucgaagaucu

SEQ ID NO: 6829 - RNA, 19 nt, Artificial Sequence
  Synthetic Oligonucleotide
acgcugagaucgaagaucu

SEQ ID NO: 6830 - RNA, 19 nt, Artificial Sequence
  Synthetic Oligonucleotide
augcugagauugaagaccu

SEQ ID NO: 6831 - RNA, 19 nt, Artificial Sequence
  Synthetic Oligonucleotide
augcugaaauugaagaucu

SEQ ID NO: 6832 - RNA, 19 nt, Artificial Sequence
  Synthetic Oligonucleotide
acgcugagauugaagaucu

SEQ ID NO: 6833 - RNA, 19 nt, Artificial Sequence
  Synthetic Oligonucleotide
augcugagcucgaagaccu

SEQ ID NO: 6834 - RNA, 19 nt, Artificial Sequence
  Synthetic Oligonucleotide
augcugaguacgaagaucu

SEQ ID NO: 6835 - RNA, 19 nt, Artificial Sequence
  Synthetic Oligonucleotide
augccgagaucgaagaccu

SEQ ID NO: 6836 - RNA, 19 nt, Artificial Sequence
  Synthetic Oligonucleotide
acgcugaaauugaagaucu

SEQ ID NO: 6837 - RNA, 19 nt, Artificial Sequence
  Synthetic Oligonucleotide
augcugaagaugaagaucu

SEQ ID NO: 6838 - RNA, 19 nt, Artificial Sequence
  Synthetic Oligonucleotide
gcugagauugaagaucuca

SEQ ID NO: 6839 - RNA, 19 nt, Artificial Sequence
  Synthetic Oligonucleotide
gcugagauugaagaucuua

SEQ ID NO: 6840 - RNA, 19 nt, Artificial Sequence
  Synthetic Oligonucleotide
gcugagaucgaagaucuaa

SEQ ID NO: 6841 - RNA, 19 nt, Artificial Sequence
  Synthetic Oligonucleotide
gcugagaucgaagaccuca

SEQ ID NO: 6842 - RNA, 19 nt, Artificial Sequence
  Synthetic Oligonucleotide
gcugagauagaagaucuca

SEQ ID NO: 6843 - RNA, 19 nt, Artificial Sequence
  Synthetic Oligonucleotide
gcugaguucgaagaucuca

SEQ ID NO: 6844 - RNA, 19 nt, Artificial Sequence
  Synthetic Oligonucleotide
gcugaaaucgaagaucuca

SEQ ID NO: 6845 - RNA, 19 nt, Artificial Sequence
  Synthetic Oligonucleotide
acugagaucgaagaucuca

SEQ ID NO: 6846 - RNA, 19 nt, Artificial Sequence
  Synthetic Oligonucleotide
gcugaaauugaagaucuca

SEQ ID NO: 6847 - RNA, 19 nt, Artificial Sequence
  Synthetic Oligonucleotide
gcugagauugaagaccuua

SEQ ID NO: 6848 - RNA, 19 nt, Artificial Sequence
  Synthetic Oligonucleotide
gcugaaauugaagaucuua

SEQ ID NO: 6849 - RNA, 19 nt, Artificial Sequence
  Synthetic Oligonucleotide
gcugagcucgaagaccuca

SEQ ID NO: 6850 - RNA, 19 nt, Artificial Sequence
  Synthetic Oligonucleotide
gcugaguacgaagaucuca

SEQ ID NO: 6851 - RNA, 19 nt, Artificial Sequence
  Synthetic Oligonucleotide
gccgagaucgaagaccuca

SEQ ID NO: 6852 - RNA, 19 nt, Artificial Sequence
  Synthetic Oligonucleotide
gcugaaauugaagaucucc

SEQ ID NO: 6853 - RNA, 19 nt, Artificial Sequence
  Synthetic Oligonucleotide
gcugaagaugaagaucuca

SEQ ID NO: 6854 - RNA, 19 nt, Artificial Sequence
  Synthetic Oligonucleotide
ugcugagauugaagaucuc

SEQ ID NO: 6855 - RNA, 19 nt, Artificial Sequence
  Synthetic Oligonucleotide
ugcugagauugaagaucuu

SEQ ID NO: 6856 - RNA, 19 nt, Artificial Sequence
  Synthetic Oligonucleotide
ugcugagaucgaagaucua

SEQ ID NO: 6857 - RNA, 19 nt, Artificial Sequence
  Synthetic Oligonucleotide
ugcugagaucgaagaccuc

SEQ ID NO: 6858 - RNA, 19 nt, Artificial Sequence
  Synthetic Oligonucleotide
ugcugagauagaagaucuc

SEQ ID NO: 6859 - RNA, 19 nt, Artificial Sequence
  Synthetic Oligonucleotide
ugcugaguucgaagaucuc

SEQ ID NO: 6860 - RNA, 19 nt, Artificial Sequence
  Synthetic Oligonucleotide
ugcugaaaucgaagaucuc

SEQ ID NO: 6861 - RNA, 19 nt, Artificial Sequence
  Synthetic Oligonucleotide
uacugagaucgaagaucuc

SEQ ID NO: 6862 - RNA, 19 nt, Artificial Sequence
  Synthetic Oligonucleotide
cgcugagaucgaagaucuc

SEQ ID NO: 6863 - RNA, 19 nt, Artificial Sequence
  Synthetic Oligonucleotide
ugcugaaauugaagaucuc

SEQ ID NO: 6864 - RNA, 19 nt, Artificial Sequence
  Synthetic Oligonucleotide
cgcugagauugaagaucuc

SEQ ID NO: 6865 - RNA, 19 nt, Artificial Sequence
  Synthetic Oligonucleotide
ugcugagauugaagaccuu

SEQ ID NO: 6866 - RNA, 19 nt, Artificial Sequence
  Synthetic Oligonucleotide
ugcugaaauugaagaucuu

SEQ ID NO: 6867 - RNA, 19 nt, Artificial Sequence
  Synthetic Oligonucleotide
ugcugagcucgaagaccuc

SEQ ID NO: 6868 - RNA, 19 nt, Artificial Sequence
  Synthetic Oligonucleotide
ugcugaguacgaagaucuc

SEQ ID NO: 6869 - RNA, 19 nt, Artificial Sequence
  Synthetic Oligonucleotide
ugccgagaucgaagaccuc

SEQ ID NO: 6870 - RNA, 19 nt, Artificial Sequence
  Synthetic Oligonucleotide
cgcugaaauugaagaucuc

SEQ ID NO: 6871 - RNA, 19 nt, Artificial Sequence
  Synthetic Oligonucleotide
ugcugaagaugaagaucuc

SEQ ID NO: 6872 - RNA, 19 nt, Artificial Sequence
  Synthetic Oligonucleotide
cgcugaaauugaagaucuu

SEQ ID NO: 6873 - RNA, 19 nt, Artificial Sequence
  Synthetic Oligonucleotide
uucuacauccaaaugugua

SEQ ID NO: 6874 - RNA, 19 nt, Artificial Sequence
  Synthetic Oligonucleotide
uucuacauccagaugugca

SEQ ID NO: 6875 - RNA, 19 nt, Artificial Sequence
  Synthetic Oligonucleotide
uucuacauucaaaugugca

SEQ ID NO: 6876 - RNA, 19 nt, Artificial Sequence
  Synthetic Oligonucleotide
uucuauauccaaaugugca

SEQ ID NO: 6877 - RNA, 19 nt, Artificial Sequence
  Synthetic Oligonucleotide
uuuuacauccaaaugugca

SEQ ID NO: 6878 - RNA, 19 nt, Artificial Sequence
  Synthetic Oligonucleotide
uucuauauccaaaugugua

SEQ ID NO: 6879 - RNA, 19 nt, Artificial Sequence
  Synthetic Oligonucleotide
uucuacauacaaaugugca

SEQ ID NO: 6880 - RNA, 19 nt, Artificial Sequence
  Synthetic Oligonucleotide
uucuacauacagaugugca

SEQ ID NO: 6881 - RNA, 19 nt, Artificial Sequence
  Synthetic Oligonucleotide
uucuacauacagaugugua

SEQ ID NO: 6882 - RNA, 19 nt, Artificial Sequence
  Synthetic Oligonucleotide
uuuuacauacagaugugca

SEQ ID NO: 6883 - RNA, 19 nt, Artificial Sequence
  Synthetic Oligonucleotide
ucuacauccaaauguguac

SEQ ID NO: 6884 - RNA, 19 nt, Artificial Sequence
  Synthetic Oligonucleotide
ucuacauccagaugugcac

SEQ ID NO: 6885 - RNA, 19 nt, Artificial Sequence
  Synthetic Oligonucleotide
ucuacauucaaaugugcac

SEQ ID NO: 6886 - RNA, 19 nt, Artificial Sequence
  Synthetic Oligonucleotide
ucuauauccaaaugugcac

SEQ ID NO: 6887 - RNA, 19 nt, Artificial Sequence
  Synthetic Oligonucleotide
uuuacauccaaaugugcac

SEQ ID NO: 6888 - RNA, 19 nt, Artificial Sequence
  Synthetic Oligonucleotide
ucuauauccaaauguguac

SEQ ID NO: 6889 - RNA, 19 nt, Artificial Sequence
  Synthetic Oligonucleotide
ucuacauacaaaugugcac

SEQ ID NO: 6890 - RNA, 19 nt, Artificial Sequence
  Synthetic Oligonucleotide
ucuacauacagaugugcac

SEQ ID NO: 6891 - RNA, 19 nt, Artificial Sequence
  Synthetic Oligonucleotide
ucuacauacagauguguac

SEQ ID NO: 6892 - RNA, 19 nt, Artificial Sequence
  Synthetic Oligonucleotide
uuuacauacagaugugcac

SEQ ID NO: 6893 - RNA, 19 nt, Artificial Sequence
  Synthetic Oligonucleotide
agggaacucguucuuuaug

SEQ ID NO: 6894 - RNA, 19 nt, Artificial Sequence
  Synthetic Oligonucleotide
agggaacuuguccuuuaug

SEQ ID NO: 6895 - RNA, 19 nt, Artificial Sequence
  Synthetic Oligonucleotide
agggagcucguccuuuaug

SEQ ID NO: 6896 - RNA, 19 nt, Artificial Sequence
  Synthetic Oligonucleotide
agggaacucguccuuuacg

SEQ ID NO: 6897 - RNA, 19 nt, Artificial Sequence
  Synthetic Oligonucleotide
agggaacucguccuuuuug

SEQ ID NO: 6898 - RNA, 19 nt, Artificial Sequence
  Synthetic Oligonucleotide
agggaacucguccuauaug

SEQ ID NO: 6899 - RNA, 19 nt, Artificial Sequence
  Synthetic Oligonucleotide
agggaacucguccucuaug

SEQ ID NO: 6900 - RNA, 19 nt, Artificial Sequence
  Synthetic Oligonucleotide
agggaacucgcccuuuaug

SEQ ID NO: 6901 - RNA, 19 nt, Artificial Sequence
  Synthetic Oligonucleotide
agggaacucauccuuuaug

SEQ ID NO: 6902 - RNA, 19 nt, Artificial Sequence
  Synthetic Oligonucleotide
aggaaacucguccuuuaug

SEQ ID NO: 6903 - RNA, 19 nt, Artificial Sequence
  Synthetic Oligonucleotide
agagaacucguccuuuaug

SEQ ID NO: 6904 - RNA, 19 nt, Artificial Sequence
  Synthetic Oligonucleotide
agggaacuuauccuuuaug

SEQ ID NO: 6905 - RNA, 19 nt, Artificial Sequence
  Synthetic Oligonucleotide
agagaacucauccuuuaug

SEQ ID NO: 6906 - RNA, 19 nt, Artificial Sequence
  Synthetic Oligonucleotide
agagaacucauucuuuaug

SEQ ID NO: 6907 - RNA, 19 nt, Artificial Sequence
  Synthetic Oligonucleotide
agagaacucacccuuuaug

SEQ ID NO: 6908 - RNA, 19 nt, Artificial Sequence
  Synthetic Oligonucleotide
gggaacucguucuuuauga

SEQ ID NO: 6909 - RNA, 19 nt, Artificial Sequence
  Synthetic Oligonucleotide
gggaacuuguccuuuauga

SEQ ID NO: 6910 - RNA, 19 nt, Artificial Sequence
  Synthetic Oligonucleotide
gggagcucguccuuuauga

SEQ ID NO: 6911 - RNA, 19 nt, Artificial Sequence
  Synthetic Oligonucleotide
gggaacucguccuuuacga

SEQ ID NO: 6912 - RNA, 19 nt, Artificial Sequence
  Synthetic Oligonucleotide
gggaacucguccuuuuuga

SEQ ID NO: 6913 - RNA, 19 nt, Artificial Sequence
  Synthetic Oligonucleotide
gggaacucguccuauauga

SEQ ID NO: 6914 - RNA, 19 nt, Artificial Sequence
  Synthetic Oligonucleotide
gggaacucguccucuauga

SEQ ID NO: 6915 - RNA, 19 nt, Artificial Sequence
  Synthetic Oligonucleotide
gggaacucgcccuuuauga

SEQ ID NO: 6916 - RNA, 19 nt, Artificial Sequence
  Synthetic Oligonucleotide
gggaacucauccuuuauga

SEQ ID NO: 6917 - RNA, 19 nt, Artificial Sequence
  Synthetic Oligonucleotide
ggaaacucguccuuuauga

SEQ ID NO: 6918 - RNA, 19 nt, Artificial Sequence
  Synthetic Oligonucleotide
gagaacucguccuuuauga

SEQ ID NO: 6919 - RNA, 19 nt, Artificial Sequence
  Synthetic Oligonucleotide
gggaacuuauccuuuauga

SEQ ID NO: 6920 - RNA, 19 nt, Artificial Sequence
  Synthetic Oligonucleotide
gagaacucauccuuuauga

SEQ ID NO: 6921 - RNA, 19 nt, Artificial Sequence
  Synthetic Oligonucleotide
gagaacucauucuuuauga

SEQ ID NO: 6922 - RNA, 19 nt, Artificial Sequence
  Synthetic Oligonucleotide
gagaacucacccuuuauga

SEQ ID NO: 6923 - RNA, 19 nt, Artificial Sequence
  Synthetic Oligonucleotide
augagagaaugugcaacgu

SEQ ID NO: 6924 - RNA, 19 nt, Artificial Sequence
  Synthetic Oligonucleotide
augagagaaugugcaauau

SEQ ID NO: 6925 - RNA, 19 nt, Artificial Sequence
  Synthetic Oligonucleotide
augagagaauguguaacau

SEQ ID NO: 6926 - RNA, 19 nt, Artificial Sequence
  Synthetic Oligonucleotide
augagaggaugugcaacau

SEQ ID NO: 6927 - RNA, 19 nt, Artificial Sequence
  Synthetic Oligonucleotide
augagagaaugugcaccau

SEQ ID NO: 6928 - RNA, 19 nt, Artificial Sequence
  Synthetic Oligonucleotide
augaaagaaugugcaacau

SEQ ID NO: 6929 - RNA, 19 nt, Artificial Sequence
  Synthetic Oligonucleotide
augauagaaugugcaacau

SEQ ID NO: 6930 - RNA, 19 nt, Artificial Sequence
  Synthetic Oligonucleotide
acgagagaaugugcaacau

SEQ ID NO: 6931 - RNA, 19 nt, Artificial Sequence
  Synthetic Oligonucleotide
augaaagaaugugcaauau

SEQ ID NO: 6932 - RNA, 19 nt, Artificial Sequence
  Synthetic Oligonucleotide
acgagaggaugugcaacau

SEQ ID NO: 6933 - RNA, 19 nt, Artificial Sequence
  Synthetic Oligonucleotide
augaaagaauaugcaacau

SEQ ID NO: 6934 - RNA, 19 nt, Artificial Sequence
  Synthetic Oligonucleotide
acgaaagaaugugcaacau

SEQ ID NO: 6935 - RNA, 19 nt, Artificial Sequence
  Synthetic Oligonucleotide
uaugagagaaugugcaacg

SEQ ID NO: 6936 - RNA, 19 nt, Artificial Sequence
  Synthetic Oligonucleotide
uaugagagaaugugcaaua

SEQ ID NO: 6937 - RNA, 19 nt, Artificial Sequence
  Synthetic Oligonucleotide
uaugagagaauguguaaca

SEQ ID NO: 6938 - RNA, 19 nt, Artificial Sequence
  Synthetic Oligonucleotide
uaugagaggaugugcaaca

SEQ ID NO: 6939 - RNA, 19 nt, Artificial Sequence
  Synthetic Oligonucleotide
uaugagagaaugugcacca

SEQ ID NO: 6940 - RNA, 19 nt, Artificial Sequence
  Synthetic Oligonucleotide
uaugaaagaaugugcaaca

SEQ ID NO: 6941 - RNA, 19 nt, Artificial Sequence
  Synthetic Oligonucleotide
uaugauagaaugugcaaca

SEQ ID NO: 6942 - RNA, 19 nt, Artificial Sequence
  Synthetic Oligonucleotide
uacgagagaaugugcaaca

SEQ ID NO: 6943 - RNA, 19 nt, Artificial Sequence
  Synthetic Oligonucleotide
uaugaaagaaugugcaaua

SEQ ID NO: 6944 - RNA, 19 nt, Artificial Sequence
  Synthetic Oligonucleotide
uacgagaggaugugcaaca

SEQ ID NO: 6945 - RNA, 19 nt, Artificial Sequence
  Synthetic Oligonucleotide
uaugaaagaauaugcaaca

SEQ ID NO: 6946 - RNA, 19 nt, Artificial Sequence
  Synthetic Oligonucleotide
uacgaaagaaugugcaaca

SEQ ID NO: 6947 - RNA, 19 nt, Artificial Sequence
  Synthetic Oligonucleotide
ugagggaacucguucuuua

SEQ ID NO: 6948 - RNA, 19 nt, Artificial Sequence
  Synthetic Oligonucleotide
ugagggaacuuguccuuua

SEQ ID NO: 6949 - RNA, 19 nt, Artificial Sequence
  Synthetic Oligonucleotide
ugagggagcucguccuuua

SEQ ID NO: 6950 - RNA, 19 nt, Artificial Sequence
  Synthetic Oligonucleotide
ugagggaacucguccuuuu

SEQ ID NO: 6951 - RNA, 19 nt, Artificial Sequence
  Synthetic Oligonucleotide
ugagggaacucguccuaua

SEQ ID NO: 6952 - RNA, 19 nt, Artificial Sequence
  Synthetic Oligonucleotide
ugagggaacucguccucua

SEQ ID NO: 6953 - RNA, 19 nt, Artificial Sequence
  Synthetic Oligonucleotide
ugagggaacucgcccuuua

SEQ ID NO: 6954 - RNA, 19 nt, Artificial Sequence
  Synthetic Oligonucleotide
ugagggaacucauccuuua

SEQ ID NO: 6955 - RNA, 19 nt, Artificial Sequence
  Synthetic Oligonucleotide
ugaggaaacucguccuuua

SEQ ID NO: 6956 - RNA, 19 nt, Artificial Sequence
  Synthetic Oligonucleotide
ugagagaacucguccuuua

SEQ ID NO: 6957 - RNA, 19 nt, Artificial Sequence
  Synthetic Oligonucleotide
uaagggaacucguccuuua

SEQ ID NO: 6958 - RNA, 19 nt, Artificial Sequence
  Synthetic Oligonucleotide
cgagggaacucguccuuua

SEQ ID NO: 6959 - RNA, 19 nt, Artificial Sequence
  Synthetic Oligonucleotide
ugagggaacuuauccuuua

SEQ ID NO: 6960 - RNA, 19 nt, Artificial Sequence
  Synthetic Oligonucleotide
ugagagaacucauccuuua

SEQ ID NO: 6961 - RNA, 19 nt, Artificial Sequence
  Synthetic Oligonucleotide
uaagggaacucauccuuua

SEQ ID NO: 6962 - RNA, 19 nt, Artificial Sequence
  Synthetic Oligonucleotide
ugagagaacucauucuuua

SEQ ID NO: 6963 - RNA, 19 nt, Artificial Sequence
  Synthetic Oligonucleotide
ugagagaacucacccuuua

SEQ ID NO: 6964 - RNA, 19 nt, Artificial Sequence
  Synthetic Oligonucleotide
ggagagaacucauccuuua

SEQ ID NO: 6965 - RNA, 19 nt, Artificial Sequence
  Synthetic Oligonucleotide
gagggaacucguucuuuau

SEQ ID NO: 6966 - RNA, 19 nt, Artificial Sequence
  Synthetic Oligonucleotide
gagggaacuuguccuuuau

SEQ ID NO: 6967 - RNA, 19 nt, Artificial Sequence
  Synthetic Oligonucleotide
gagggagcucguccuuuau

SEQ ID NO: 6968 - RNA, 19 nt, Artificial Sequence
  Synthetic Oligonucleotide
gagggaacucguccuuuac

SEQ ID NO: 6969 - RNA, 19 nt, Artificial Sequence
  Synthetic Oligonucleotide
gagggaacucguccuuuuu

SEQ ID NO: 6970 - RNA, 19 nt, Artificial Sequence
  Synthetic Oligonucleotide
gagggaacucguccuauau

SEQ ID NO: 6971 - RNA, 19 nt, Artificial Sequence
  Synthetic Oligonucleotide
gagggaacucguccucuau

SEQ ID NO: 6972 - RNA, 19 nt, Artificial Sequence
  Synthetic Oligonucleotide
gagggaacucgcccuuuau

SEQ ID NO: 6973 - RNA, 19 nt, Artificial Sequence
  Synthetic Oligonucleotide
gagggaacucauccuuuau

SEQ ID NO: 6974 - RNA, 19 nt, Artificial Sequence
  Synthetic Oligonucleotide
gaggaaacucguccuuuau

SEQ ID NO: 6975 - RNA, 19 nt, Artificial Sequence
  Synthetic Oligonucleotide
gagagaacucguccuuuau

SEQ ID NO: 6976 - RNA, 19 nt, Artificial Sequence
  Synthetic Oligonucleotide
aagggaacucguccuuuau

SEQ ID NO: 6977 - RNA, 19 nt, Artificial Sequence
  Synthetic Oligonucleotide
gagggaacuuauccuuuau

SEQ ID NO: 6978 - RNA, 19 nt, Artificial Sequence
  Synthetic Oligonucleotide
gagagaacucauccuuuau

SEQ ID NO: 6979 - RNA, 19 nt, Artificial Sequence
  Synthetic Oligonucleotide
aagggaacucauccuuuau

SEQ ID NO: 6980 - RNA, 19 nt, Artificial Sequence
  Synthetic Oligonucleotide
gagagaacucauucuuuau

SEQ ID NO: 6981 - RNA, 19 nt, Artificial Sequence
  Synthetic Oligonucleotide
gagagaacucacccuuuau

SEQ ID NO: 6982 - RNA, 19 nt, Artificial Sequence
  Synthetic Oligonucleotide
ucaccgugccuagugagcg

SEQ ID NO: 6983 - RNA, 19 nt, Artificial Sequence
  Synthetic Oligonucleotide
ucacugugcccagugagcg

SEQ ID NO: 6984 - RNA, 19 nt, Artificial Sequence
  Synthetic Oligonucleotide
ucaccgugcccagugaacg

SEQ ID NO: 6985 - RNA, 19 nt, Artificial Sequence
  Synthetic Oligonucleotide
ucaccgugcccaguaagcg

SEQ ID NO: 6986 - RNA, 19 nt, Artificial Sequence
  Synthetic Oligonucleotide
ucaccgugcccagcgagcg

SEQ ID NO: 6987 - RNA, 19 nt, Artificial Sequence
  Synthetic Oligonucleotide
ucaccgugcccacugagcg

SEQ ID NO: 6988 - RNA, 19 nt, Artificial Sequence
  Synthetic Oligonucleotide
ucaccgugccaagugagcg

SEQ ID NO: 6989 - RNA, 19 nt, Artificial Sequence
  Synthetic Oligonucleotide
ucaccugucccagugagcg

SEQ ID NO: 6990 - RNA, 19 nt, Artificial Sequence
  Synthetic Oligonucleotide
cucaccgugccuagugagc

SEQ ID NO: 6991 - RNA, 19 nt, Artificial Sequence
  Synthetic Oligonucleotide
cucacugugcccagugagc

SEQ ID NO: 6992 - RNA, 19 nt, Artificial Sequence
  Synthetic Oligonucleotide
cucaccgugcccagugaac

SEQ ID NO: 6993 - RNA, 19 nt, Artificial Sequence
  Synthetic Oligonucleotide
cucaccgugcccaguaagc

SEQ ID NO: 6994 - RNA, 19 nt, Artificial Sequence
  Synthetic Oligonucleotide
cucaccgugcccagcgagc

SEQ ID NO: 6995 - RNA, 19 nt, Artificial Sequence
  Synthetic Oligonucleotide
cucaccgugcccacugagc

SEQ ID NO: 6996 - RNA, 19 nt, Artificial Sequence
  Synthetic Oligonucleotide
cucaccgugccaagugagc

SEQ ID NO: 6997 - RNA, 19 nt, Artificial Sequence
  Synthetic Oligonucleotide
cucaccugucccagugagc

SEQ ID NO: 6998 - RNA, 19 nt, Artificial Sequence
  Synthetic Oligonucleotide
cgggcccccucaaagccga

SEQ ID NO: 6999 - RNA, 19 nt, Artificial Sequence
  Synthetic Oligonucleotide
uaggcccccucaaagccga

SEQ ID NO: 7000 - RNA, 19 nt, Artificial Sequence
  Synthetic Oligonucleotide
caggcccccucaaagccca

SEQ ID NO: 7001 - RNA, 19 nt, Artificial Sequence
  Synthetic Oligonucleotide
ccggcccccucaaagccga

SEQ ID NO: 7002 - RNA, 19 nt, Artificial Sequence
  Synthetic Oligonucleotide
cuggcccccucaaagccga

SEQ ID NO: 7003 - RNA, 19 nt, Artificial Sequence
  Synthetic Oligonucleotide
ucggcccccucaaagccga

SEQ ID NO: 7004 - RNA, 19 nt, Artificial Sequence
  Synthetic Oligonucleotide
ucgggcccccucaaagccg

SEQ ID NO: 7005 - RNA, 19 nt, Artificial Sequence
  Synthetic Oligonucleotide
uuaggcccccucaaagccg

SEQ ID NO: 7006 - RNA, 19 nt, Artificial Sequence
  Synthetic Oligonucleotide
ucaggcccccucaaagccc

SEQ ID NO: 7007 - RNA, 19 nt, Artificial Sequence
  Synthetic Oligonucleotide
uccggcccccucaaagccg

SEQ ID NO: 7008 - RNA, 19 nt, Artificial Sequence
  Synthetic Oligonucleotide
ucuggcccccucaaagccg

SEQ ID NO: 7009 - RNA, 19 nt, Artificial Sequence
  Synthetic Oligonucleotide
gucggcccccucaaagccg

SEQ ID NO: 7010 - RNA, 19 nt, Artificial Sequence
  Synthetic Oligonucleotide
uucacgcucaccgugccua

SEQ ID NO: 7011 - RNA, 19 nt, Artificial Sequence
  Synthetic Oligonucleotide
uucacgcucacugugccca

SEQ ID NO: 7012 - RNA, 19 nt, Artificial Sequence
  Synthetic Oligonucleotide
uucacgcucaccgugccaa

SEQ ID NO: 7013 - RNA, 19 nt, Artificial Sequence
  Synthetic Oligonucleotide
uucacacucaccgugccca

SEQ ID NO: 7014 - RNA, 19 nt, Artificial Sequence
  Synthetic Oligonucleotide
uacacgcucaccgugccca

SEQ ID NO: 7015 - RNA, 19 nt, Artificial Sequence
  Synthetic Oligonucleotide
uucacgcucaccuguccca

SEQ ID NO: 7016 - RNA, 19 nt, Artificial Sequence
  Synthetic Oligonucleotide
cacgcucaccgugccuagu

SEQ ID NO: 7017 - RNA, 19 nt, Artificial Sequence
  Synthetic Oligonucleotide
cacgcucacugugcccagu

SEQ ID NO: 7018 - RNA, 19 nt, Artificial Sequence
  Synthetic Oligonucleotide
cacgcucaccgugcccagc

SEQ ID NO: 7019 - RNA, 19 nt, Artificial Sequence
  Synthetic Oligonucleotide
cacgcucaccgugcccacu

SEQ ID NO: 7020 - RNA, 19 nt, Artificial Sequence
  Synthetic Oligonucleotide
cacgcucaccgugccaagu

SEQ ID NO: 7021 - RNA, 19 nt, Artificial Sequence
  Synthetic Oligonucleotide
cacacucaccgugcccagu

SEQ ID NO: 7022 - RNA, 19 nt, Artificial Sequence
  Synthetic Oligonucleotide
cacgcucaccugucccagu

SEQ ID NO: 7023 - RNA, 19 nt, Artificial Sequence
  Synthetic Oligonucleotide
ucacgcucaccgugccuag

SEQ ID NO: 7024 - RNA, 19 nt, Artificial Sequence
  Synthetic Oligonucleotide
ucacgcucacugugcccag

SEQ ID NO: 7025 - RNA, 19 nt, Artificial Sequence
  Synthetic Oligonucleotide
ucacgcucaccgugcccac

SEQ ID NO: 7026 - RNA, 19 nt, Artificial Sequence
  Synthetic Oligonucleotide
ucacgcucaccgugccaag

SEQ ID NO: 7027 - RNA, 19 nt, Artificial Sequence
  Synthetic Oligonucleotide
ucacacucaccgugcccag

SEQ ID NO: 7028 - RNA, 19 nt, Artificial Sequence
  Synthetic Oligonucleotide
acacgcucaccgugcccag

SEQ ID NO: 7029 - RNA, 19 nt, Artificial Sequence
  Synthetic Oligonucleotide
ucacgcucaccugucccag

SEQ ID NO: 7030 - RNA, 19 nt, Artificial Sequence
  Synthetic Oligonucleotide
acgcucaccgugccuagug

SEQ ID NO: 7031 - RNA, 19 nt, Artificial Sequence
  Synthetic Oligonucleotide
acgcucacugugcccagug

SEQ ID NO: 7032 - RNA, 19 nt, Artificial Sequence
  Synthetic Oligonucleotide
acgcucaccgugcccagua

SEQ ID NO: 7033 - RNA, 19 nt, Artificial Sequence
  Synthetic Oligonucleotide
acgcucaccgugcccagcg

SEQ ID NO: 7034 - RNA, 19 nt, Artificial Sequence
  Synthetic Oligonucleotide
acgcucaccgugcccacug

SEQ ID NO: 7035 - RNA, 19 nt, Artificial Sequence
  Synthetic Oligonucleotide
acgcucaccgugccaagug

SEQ ID NO: 7036 - RNA, 19 nt, Artificial Sequence
  Synthetic Oligonucleotide
acacucaccgugcccagug

SEQ ID NO: 7037 - RNA, 19 nt, Artificial Sequence
  Synthetic Oligonucleotide
acgcucaccugucccagug

SEQ ID NO: 7038 - RNA, 19 nt, Artificial Sequence
  Synthetic Oligonucleotide
cgcucaccgugccuaguga

SEQ ID NO: 7039 - RNA, 19 nt, Artificial Sequence
  Synthetic Oligonucleotide
cgcucacugugcccaguga

SEQ ID NO: 7040 - RNA, 19 nt, Artificial Sequence
  Synthetic Oligonucleotide
cgcucaccgugcccaguaa

SEQ ID NO: 7041 - RNA, 19 nt, Artificial Sequence
  Synthetic Oligonucleotide
cgcucaccgugcccagcga

SEQ ID NO: 7042 - RNA, 19 nt, Artificial Sequence
  Synthetic Oligonucleotide
cgcucaccgugcccacuga

SEQ ID NO: 7043 - RNA, 19 nt, Artificial Sequence
  Synthetic Oligonucleotide
cgcucaccgugccaaguga

SEQ ID NO: 7044 - RNA, 19 nt, Artificial Sequence
  Synthetic Oligonucleotide
cacucaccgugcccaguga

SEQ ID NO: 7045 - RNA, 19 nt, Artificial Sequence
  Synthetic Oligonucleotide
cgcucaccugucccaguga

SEQ ID NO: 7046 - RNA, 19 nt, Artificial Sequence
  Synthetic Oligonucleotide
gcucaccgugccuagugag

SEQ ID NO: 7047 - RNA, 19 nt, Artificial Sequence
  Synthetic Oligonucleotide
gcucacugugcccagugag

SEQ ID NO: 7048 - RNA, 19 nt, Artificial Sequence
  Synthetic Oligonucleotide
gcucaccgugcccagugaa

SEQ ID NO: 7049 - RNA, 19 nt, Artificial Sequence
  Synthetic Oligonucleotide
gcucaccgugcccaguaag

SEQ ID NO: 7050 - RNA, 19 nt, Artificial Sequence
  Synthetic Oligonucleotide
gcucaccgugcccagcgag

SEQ ID NO: 7051 - RNA, 19 nt, Artificial Sequence
  Synthetic Oligonucleotide
gcucaccgugcccacugag

SEQ ID NO: 7052 - RNA, 19 nt, Artificial Sequence
  Synthetic Oligonucleotide
gcucaccgugccaagugag

SEQ ID NO: 7053 - RNA, 19 nt, Artificial Sequence
  Synthetic Oligonucleotide
acucaccgugcccagugag

SEQ ID NO: 7054 - RNA, 19 nt, Artificial Sequence
  Synthetic Oligonucleotide
gcucaccugucccagugag

SEQ ID NO: 7055 - RNA, 19 nt, Artificial Sequence
  Synthetic Oligonucleotide
gacugcagcguagacguuu

SEQ ID NO: 7056 - RNA, 19 nt, Artificial Sequence
  Synthetic Oligonucleotide
gacugcagcguagacgauu

SEQ ID NO: 7057 - RNA, 19 nt, Artificial Sequence
  Synthetic Oligonucleotide
gacugcagcguagacgguu

SEQ ID NO: 7058 - RNA, 19 nt, Artificial Sequence
  Synthetic Oligonucleotide
gacugcagcguaaacgcuu

SEQ ID NO: 7059 - RNA, 19 nt, Artificial Sequence
  Synthetic Oligonucleotide
gacugcagcguacacgcuu

SEQ ID NO: 7060 - RNA, 19 nt, Artificial Sequence
  Synthetic Oligonucleotide
gacugcagcguauacgcuu

SEQ ID NO: 7061 - RNA, 19 nt, Artificial Sequence
  Synthetic Oligonucleotide
gacugcaacguagacgcuu

SEQ ID NO: 7062 - RNA, 19 nt, Artificial Sequence
  Synthetic Oligonucleotide
gacugcagcguauacgauu

SEQ ID NO: 7063 - RNA, 19 nt, Artificial Sequence
  Synthetic Oligonucleotide
gacugcaacguauacgcuu

SEQ ID NO: 7064 - RNA, 19 nt, Artificial Sequence
  Synthetic Oligonucleotide
gacugcaucguacacucuu

SEQ ID NO: 7065 - RNA, 19 nt, Artificial Sequence
  Synthetic Oligonucleotide
ggacugcagcguagacguu

SEQ ID NO: 7066 - RNA, 19 nt, Artificial Sequence
  Synthetic Oligonucleotide
ggacugcagcguagacgau

SEQ ID NO: 7067 - RNA, 19 nt, Artificial Sequence
  Synthetic Oligonucleotide
ggacugcagcguagacggu

SEQ ID NO: 7068 - RNA, 19 nt, Artificial Sequence
  Synthetic Oligonucleotide
ggacugcagcguaaacgcu

SEQ ID NO: 7069 - RNA, 19 nt, Artificial Sequence
  Synthetic Oligonucleotide
ggacugcagcguacacgcu

SEQ ID NO: 7070 - RNA, 19 nt, Artificial Sequence
  Synthetic Oligonucleotide
ggacugcagcguauacgcu

SEQ ID NO: 7071 - RNA, 19 nt, Artificial Sequence
  Synthetic Oligonucleotide
ggacugcaacguagacgcu

SEQ ID NO: 7072 - RNA, 19 nt, Artificial Sequence
  Synthetic Oligonucleotide
ggacugcagcguauacgau

SEQ ID NO: 7073 - RNA, 19 nt, Artificial Sequence
  Synthetic Oligonucleotide
ggacugcaacguauacgcu

SEQ ID NO: 7074 - RNA, 19 nt, Artificial Sequence
  Synthetic Oligonucleotide
ggacugcaucguacacucu

SEQ ID NO: 7075 - RNA, 19 nt, Artificial Sequence
  Synthetic Oligonucleotide
ugcagcguagacguuuugu

SEQ ID NO: 7076 - RNA, 19 nt, Artificial Sequence
  Synthetic Oligonucleotide
ugcagcguagacgcuucgu

SEQ ID NO: 7077 - RNA, 19 nt, Artificial Sequence
  Synthetic Oligonucleotide
ugcagcguagacgauuugu

SEQ ID NO: 7078 - RNA, 19 nt, Artificial Sequence
  Synthetic Oligonucleotide
ugcagcguagacgguuugu

SEQ ID NO: 7079 - RNA, 19 nt, Artificial Sequence
  Synthetic Oligonucleotide
ugcagcguaaacgcuuugu

SEQ ID NO: 7080 - RNA, 19 nt, Artificial Sequence
  Synthetic Oligonucleotide
ugcagcguacacgcuuugu

SEQ ID NO: 7081 - RNA, 19 nt, Artificial Sequence
  Synthetic Oligonucleotide
ugcagcguauacgcuuugu

SEQ ID NO: 7082 - RNA, 19 nt, Artificial Sequence
  Synthetic Oligonucleotide
ugcaacguagacgcuuugu

SEQ ID NO: 7083 - RNA, 19 nt, Artificial Sequence
  Synthetic Oligonucleotide
ugcagcguauacgauuugu

SEQ ID NO: 7084 - RNA, 19 nt, Artificial Sequence
  Synthetic Oligonucleotide
ugcaacguauacgcuuugu

SEQ ID NO: 7085 - RNA, 19 nt, Artificial Sequence
  Synthetic Oligonucleotide
ugcaucguacacucuuugu

SEQ ID NO: 7086 - RNA, 19 nt, Artificial Sequence
  Synthetic Oligonucleotide
acugcagcguagacguuuu

SEQ ID NO: 7087 - RNA, 19 nt, Artificial Sequence
  Synthetic Oligonucleotide
acugcagcguagacgcuuc

SEQ ID NO: 7088 - RNA, 19 nt, Artificial Sequence
  Synthetic Oligonucleotide
acugcagcguagacgauuu

SEQ ID NO: 7089 - RNA, 19 nt, Artificial Sequence
  Synthetic Oligonucleotide
acugcagcguagacgguuu

SEQ ID NO: 7090 - RNA, 19 nt, Artificial Sequence
  Synthetic Oligonucleotide
acugcagcguaaacgcuuu

SEQ ID NO: 7091 - RNA, 19 nt, Artificial Sequence
  Synthetic Oligonucleotide
acugcagcguacacgcuuu

SEQ ID NO: 7092 - RNA, 19 nt, Artificial Sequence
  Synthetic Oligonucleotide
acugcagcguauacgcuuu

SEQ ID NO: 7093 - RNA, 19 nt, Artificial Sequence
  Synthetic Oligonucleotide
acugcaacguagacgcuuu

SEQ ID NO: 7094 - RNA, 19 nt, Artificial Sequence
  Synthetic Oligonucleotide
acugcagcguauacgauuu

SEQ ID NO: 7095 - RNA, 19 nt, Artificial Sequence
  Synthetic Oligonucleotide
acugcaacguauacgcuuu

SEQ ID NO: 7096 - RNA, 19 nt, Artificial Sequence
  Synthetic Oligonucleotide
acugcaucguacacucuuu

SEQ ID NO: 7097 - RNA, 19 nt, Artificial Sequence
  Synthetic Oligonucleotide
cugcagcguagacguuuug

SEQ ID NO: 7098 - RNA, 19 nt, Artificial Sequence
  Synthetic Oligonucleotide
cugcagcguagacgcuucg

SEQ ID NO: 7099 - RNA, 19 nt, Artificial Sequence
  Synthetic Oligonucleotide
cugcagcguagacgauuug

SEQ ID NO: 7100 - RNA, 19 nt, Artificial Sequence
  Synthetic Oligonucleotide
cugcagcguagacgguuug

SEQ ID NO: 7101 - RNA, 19 nt, Artificial Sequence
  Synthetic Oligonucleotide
cugcagcguaaacgcuuug

SEQ ID NO: 7102 - RNA, 19 nt, Artificial Sequence
  Synthetic Oligonucleotide
cugcagcguacacgcuuug

SEQ ID NO: 7103 - RNA, 19 nt, Artificial Sequence
  Synthetic Oligonucleotide
cugcagcguauacgcuuug

SEQ ID NO: 7104 - RNA, 19 nt, Artificial Sequence
  Synthetic Oligonucleotide
cugcaacguagacgcuuug

SEQ ID NO: 7105 - RNA, 19 nt, Artificial Sequence
  Synthetic Oligonucleotide
cugcagcguauacgauuug

SEQ ID NO: 7106 - RNA, 19 nt, Artificial Sequence
  Synthetic Oligonucleotide
cugcaacguauacgcuuug

SEQ ID NO: 7107 - RNA, 19 nt, Artificial Sequence
  Synthetic Oligonucleotide
cugcaucguacacucuuug

SEQ ID NO: 7108 - RNA, 19 nt, Artificial Sequence
  Synthetic Oligonucleotide
uggccagcacuacggcuaa

SEQ ID NO: 7109 - RNA, 19 nt, Artificial Sequence
  Synthetic Oligonucleotide
uggccagcauuacagcuaa

SEQ ID NO: 7110 - RNA, 19 nt, Artificial Sequence
  Synthetic Oligonucleotide
uggccaguacuacagcuaa

SEQ ID NO: 7111 - RNA, 19 nt, Artificial Sequence
  Synthetic Oligonucleotide
uggcuagcacuacagcuaa

SEQ ID NO: 7112 - RNA, 19 nt, Artificial Sequence
  Synthetic Oligonucleotide
uggccaguacuacggcuaa

SEQ ID NO: 7113 - RNA, 19 nt, Artificial Sequence
  Synthetic Oligonucleotide
uggccagcacuacagcuua

SEQ ID NO: 7114 - RNA, 19 nt, Artificial Sequence
  Synthetic Oligonucleotide
uggccagcacuacagccaa

SEQ ID NO: 7115 - RNA, 19 nt, Artificial Sequence
  Synthetic Oligonucleotide
uggccagcacuacagcgaa

SEQ ID NO: 7116 - RNA, 19 nt, Artificial Sequence
  Synthetic Oligonucleotide
uggccagcacuaccgcuaa

SEQ ID NO: 7117 - RNA, 19 nt, Artificial Sequence
  Synthetic Oligonucleotide
uggccagcacaacagcuaa

SEQ ID NO: 7118 - RNA, 19 nt, Artificial Sequence
  Synthetic Oligonucleotide
uggccagcaccacagcuaa

SEQ ID NO: 7119 - RNA, 19 nt, Artificial Sequence
  Synthetic Oligonucleotide
uggccagcaauacagcuaa

SEQ ID NO: 7120 - RNA, 19 nt, Artificial Sequence
  Synthetic Oligonucleotide
uggcaagcacuacagcuaa

SEQ ID NO: 7121 - RNA, 19 nt, Artificial Sequence
  Synthetic Oligonucleotide
uagccagcacuacagcuaa

SEQ ID NO: 7122 - RNA, 19 nt, Artificial Sequence
  Synthetic Oligonucleotide
uggcuagcaccacagcuaa

SEQ ID NO: 7123 - RNA, 19 nt, Artificial Sequence
  Synthetic Oligonucleotide
uagccagcacuacggcuaa

SEQ ID NO: 7124 - RNA, 19 nt, Artificial Sequence
  Synthetic Oligonucleotide
uagcuagcacuacagcuaa

SEQ ID NO: 7125 - RNA, 19 nt, Artificial Sequence
  Synthetic Oligonucleotide
uggccaguaccacggcuaa

SEQ ID NO: 7126 - RNA, 19 nt, Artificial Sequence
  Synthetic Oligonucleotide
uagccagcacuacagccaa

SEQ ID NO: 7127 - RNA, 19 nt, Artificial Sequence
  Synthetic Oligonucleotide
uagccagcacaacagcuaa

SEQ ID NO: 7128 - RNA, 19 nt, Artificial Sequence
  Synthetic Oligonucleotide
uagccagcaccacggcuaa

SEQ ID NO: 7129 - RNA, 19 nt, Artificial Sequence
  Synthetic Oligonucleotide
agcguagacgcuuuguuca

SEQ ID NO: 7130 - RNA, 19 nt, Artificial Sequence
  Synthetic Oligonucleotide
agcguagacguuuugucca

SEQ ID NO: 7131 - RNA, 19 nt, Artificial Sequence
  Synthetic Oligonucleotide
agcguagacgcuucgucca

SEQ ID NO: 7132 - RNA, 19 nt, Artificial Sequence
  Synthetic Oligonucleotide
agcguagacgauuugucca

SEQ ID NO: 7133 - RNA, 19 nt, Artificial Sequence
  Synthetic Oligonucleotide
agcguagacgguuugucca

SEQ ID NO: 7134 - RNA, 19 nt, Artificial Sequence
  Synthetic Oligonucleotide
agcguaaacgcuuugucca

SEQ ID NO: 7135 - RNA, 19 nt, Artificial Sequence
  Synthetic Oligonucleotide
agcguacacgcuuugucca

SEQ ID NO: 7136 - RNA, 19 nt, Artificial Sequence
  Synthetic Oligonucleotide
agcguauacgcuuugucca

SEQ ID NO: 7137 - RNA, 19 nt, Artificial Sequence
  Synthetic Oligonucleotide
aacguagacgcuuugucca

SEQ ID NO: 7138 - RNA, 19 nt, Artificial Sequence
  Synthetic Oligonucleotide
aacguagacgcuuuguuca

SEQ ID NO: 7139 - RNA, 19 nt, Artificial Sequence
  Synthetic Oligonucleotide
agcguauacgauuugucca

SEQ ID NO: 7140 - RNA, 19 nt, Artificial Sequence
  Synthetic Oligonucleotide
aacguauacgcuuugucca

SEQ ID NO: 7141 - RNA, 19 nt, Artificial Sequence
  Synthetic Oligonucleotide
aucguacacucuuugucca

SEQ ID NO: 7142 - RNA, 19 nt, Artificial Sequence
  Synthetic Oligonucleotide
gcagcguagacgcuuuguu

SEQ ID NO: 7143 - RNA, 19 nt, Artificial Sequence
  Synthetic Oligonucleotide
gcagcguagacguuuuguc

SEQ ID NO: 7144 - RNA, 19 nt, Artificial Sequence
  Synthetic Oligonucleotide
gcagcguagacgcuucguc

SEQ ID NO: 7145 - RNA, 19 nt, Artificial Sequence
  Synthetic Oligonucleotide
gcagcguagacgauuuguc

SEQ ID NO: 7146 - RNA, 19 nt, Artificial Sequence
  Synthetic Oligonucleotide
gcagcguagacgguuuguc

SEQ ID NO: 7147 - RNA, 19 nt, Artificial Sequence
  Synthetic Oligonucleotide
gcagcguaaacgcuuuguc

SEQ ID NO: 7148 - RNA, 19 nt, Artificial Sequence
  Synthetic Oligonucleotide
gcagcguacacgcuuuguc

SEQ ID NO: 7149 - RNA, 19 nt, Artificial Sequence
  Synthetic Oligonucleotide
gcagcguauacgcuuuguc

SEQ ID NO: 7150 - RNA, 19 nt, Artificial Sequence
  Synthetic Oligonucleotide
gcaacguagacgcuuuguc

SEQ ID NO: 7151 - RNA, 19 nt, Artificial Sequence
  Synthetic Oligonucleotide
gcaacguagacgcuuuguu

SEQ ID NO: 7152 - RNA, 19 nt, Artificial Sequence
  Synthetic Oligonucleotide
gcagcguauacgauuuguc

SEQ ID NO: 7153 - RNA, 19 nt, Artificial Sequence
  Synthetic Oligonucleotide
gcaacguauacgcuuuguc

SEQ ID NO: 7154 - RNA, 19 nt, Artificial Sequence
  Synthetic Oligonucleotide
gcaucguacacucuuuguc

SEQ ID NO: 7155 - RNA, 19 nt, Artificial Sequence
  Synthetic Oligonucleotide
cagcguagacgcuuuguuc

SEQ ID NO: 7156 - RNA, 19 nt, Artificial Sequence
  Synthetic Oligonucleotide
cagcguagacguuuugucc

SEQ ID NO: 7157 - RNA, 19 nt, Artificial Sequence
  Synthetic Oligonucleotide
cagcguagacgcuucgucc

SEQ ID NO: 7158 - RNA, 19 nt, Artificial Sequence
  Synthetic Oligonucleotide
cagcguagacgauuugucc

SEQ ID NO: 7159 - RNA, 19 nt, Artificial Sequence
  Synthetic Oligonucleotide
cagcguagacgguuugucc

SEQ ID NO: 7160 - RNA, 19 nt, Artificial Sequence
  Synthetic Oligonucleotide
cagcguaaacgcuuugucc

SEQ ID NO: 7161 - RNA, 19 nt, Artificial Sequence
  Synthetic Oligonucleotide
cagcguacacgcuuugucc

SEQ ID NO: 7162 - RNA, 19 nt, Artificial Sequence
  Synthetic Oligonucleotide
cagcguauacgcuuugucc

SEQ ID NO: 7163 - RNA, 19 nt, Artificial Sequence
  Synthetic Oligonucleotide
caacguagacgcuuugucc

SEQ ID NO: 7164 - RNA, 19 nt, Artificial Sequence
  Synthetic Oligonucleotide
caacguagacgcuuuguuc

SEQ ID NO: 7165 - RNA, 19 nt, Artificial Sequence
  Synthetic Oligonucleotide
cagcguauacgauuugucc

SEQ ID NO: 7166 - RNA, 19 nt, Artificial Sequence
  Synthetic Oligonucleotide
caacguauacgcuuugucc

SEQ ID NO: 7167 - RNA, 19 nt, Artificial Sequence
  Synthetic Oligonucleotide
caucguacacucuuugucc

SEQ ID NO: 7168 - RNA, 19 nt, Artificial Sequence
  Synthetic Oligonucleotide
gaucuugagguucucaugg

SEQ ID NO: 7169 - RNA, 19 nt, Artificial Sequence
  Synthetic Oligonucleotide
gaucuugaggcucucacgg

SEQ ID NO: 7170 - RNA, 19 nt, Artificial Sequence
  Synthetic Oligonucleotide
gaucuugaggcucuaaugg

SEQ ID NO: 7171 - RNA, 19 nt, Artificial Sequence
  Synthetic Oligonucleotide
gaucuugaggcacucaugg

SEQ ID NO: 7172 - RNA, 19 nt, Artificial Sequence
  Synthetic Oligonucleotide
gaucuugaagcucucaugg

SEQ ID NO: 7173 - RNA, 19 nt, Artificial Sequence
  Synthetic Oligonucleotide
gaucuugaugcucucaugg

SEQ ID NO: 7174 - RNA, 19 nt, Artificial Sequence
  Synthetic Oligonucleotide
gaucuagaggcucucaugg

SEQ ID NO: 7175 - RNA, 19 nt, Artificial Sequence
  Synthetic Oligonucleotide
gaucucgaggcucucaugg

SEQ ID NO: 7176 - RNA, 19 nt, Artificial Sequence
  Synthetic Oligonucleotide
gaccuugaggcucucaugg

SEQ ID NO: 7177 - RNA, 19 nt, Artificial Sequence
  Synthetic Oligonucleotide
gaucuugagguucucacgg

SEQ ID NO: 7178 - RNA, 19 nt, Artificial Sequence
  Synthetic Oligonucleotide
gaucucgaggcacucaugg

SEQ ID NO: 7179 - RNA, 19 nt, Artificial Sequence
  Synthetic Oligonucleotide
aucuugagguucucaugga

SEQ ID NO: 7180 - RNA, 19 nt, Artificial Sequence
  Synthetic Oligonucleotide
aucuugaggcucucacgga

SEQ ID NO: 7181 - RNA, 19 nt, Artificial Sequence
  Synthetic Oligonucleotide
aucuugaggcucuaaugga

SEQ ID NO: 7182 - RNA, 19 nt, Artificial Sequence
  Synthetic Oligonucleotide
aucuugaggcacucaugga

SEQ ID NO: 7183 - RNA, 19 nt, Artificial Sequence
  Synthetic Oligonucleotide
aucuugaagcucucaugga

SEQ ID NO: 7184 - RNA, 19 nt, Artificial Sequence
  Synthetic Oligonucleotide
aucuugaugcucucaugga

SEQ ID NO: 7185 - RNA, 19 nt, Artificial Sequence
  Synthetic Oligonucleotide
aucuagaggcucucaugga

SEQ ID NO: 7186 - RNA, 19 nt, Artificial Sequence
  Synthetic Oligonucleotide
aucucgaggcucucaugga

SEQ ID NO: 7187 - RNA, 19 nt, Artificial Sequence
  Synthetic Oligonucleotide
accuugaggcucucaugga

SEQ ID NO: 7188 - RNA, 19 nt, Artificial Sequence
  Synthetic Oligonucleotide
aucuugagguucucacgga

SEQ ID NO: 7189 - RNA, 19 nt, Artificial Sequence
  Synthetic Oligonucleotide
aucucgaggcacucaugga

SEQ ID NO: 7190 - RNA, 19 nt, Artificial Sequence
  Synthetic Oligonucleotide
cugucaccucugacuaggg

SEQ ID NO: 7191 - RNA, 19 nt, Artificial Sequence
  Synthetic Oligonucleotide
cugucacuucugacuaagg

SEQ ID NO: 7192 - RNA, 19 nt, Artificial Sequence
  Synthetic Oligonucleotide
cugucgccucugacuaagg

SEQ ID NO: 7193 - RNA, 19 nt, Artificial Sequence
  Synthetic Oligonucleotide
cugucaccucugacuaaag

SEQ ID NO: 7194 - RNA, 19 nt, Artificial Sequence
  Synthetic Oligonucleotide
cugucaccucugacaaagg

SEQ ID NO: 7195 - RNA, 19 nt, Artificial Sequence
  Synthetic Oligonucleotide
cugucaccucugaccaagg

SEQ ID NO: 7196 - RNA, 19 nt, Artificial Sequence
  Synthetic Oligonucleotide
cugucaccucuaacuaagg

SEQ ID NO: 7197 - RNA, 19 nt, Artificial Sequence
  Synthetic Oligonucleotide
cugucaccucuuacuaagg

SEQ ID NO: 7198 - RNA, 19 nt, Artificial Sequence
  Synthetic Oligonucleotide
cugucaccacugacuaagg

SEQ ID NO: 7199 - RNA, 19 nt, Artificial Sequence
  Synthetic Oligonucleotide
cugucuccucugacuaagg

SEQ ID NO: 7200 - RNA, 19 nt, Artificial Sequence
  Synthetic Oligonucleotide
cugucaccuuugacuaaag

SEQ ID NO: 7201 - RNA, 19 nt, Artificial Sequence
  Synthetic Oligonucleotide
uugucaccucugacuaaag

SEQ ID NO: 7202 - RNA, 19 nt, Artificial Sequence
  Synthetic Oligonucleotide
cugucaccucugacaaaag

SEQ ID NO: 7203 - RNA, 19 nt, Artificial Sequence
  Synthetic Oligonucleotide
ugucaccucugacuagggg

SEQ ID NO: 7204 - RNA, 19 nt, Artificial Sequence
  Synthetic Oligonucleotide
ugucacuucugacuaaggg

SEQ ID NO: 7205 - RNA, 19 nt, Artificial Sequence
  Synthetic Oligonucleotide
ugucgccucugacuaaggg

SEQ ID NO: 7206 - RNA, 19 nt, Artificial Sequence
  Synthetic Oligonucleotide
ugucaccucugacuaaagg

SEQ ID NO: 7207 - RNA, 19 nt, Artificial Sequence
  Synthetic Oligonucleotide
ugucaccucugacaaaggg

SEQ ID NO: 7208 - RNA, 19 nt, Artificial Sequence
  Synthetic Oligonucleotide
ugucaccucugaccaaggg

SEQ ID NO: 7209 - RNA, 19 nt, Artificial Sequence
  Synthetic Oligonucleotide
ugucaccucuaacuaaggg

SEQ ID NO: 7210 - RNA, 19 nt, Artificial Sequence
  Synthetic Oligonucleotide
ugucaccucuuacuaaggg

SEQ ID NO: 7211 - RNA, 19 nt, Artificial Sequence
  Synthetic Oligonucleotide
ugucaccacugacuaaggg

SEQ ID NO: 7212 - RNA, 19 nt, Artificial Sequence
  Synthetic Oligonucleotide
ugucuccucugacuaaggg

SEQ ID NO: 7213 - RNA, 19 nt, Artificial Sequence
  Synthetic Oligonucleotide
ugucaccuuugacuaaagg

SEQ ID NO: 7214 - RNA, 19 nt, Artificial Sequence
  Synthetic Oligonucleotide
ugucaccucugacaaaagg

SEQ ID NO: 7215 - RNA, 19 nt, Artificial Sequence
  Synthetic Oligonucleotide
guagacgcuuuguccagaa

SEQ ID NO: 7216 - RNA, 19 nt, Artificial Sequence
  Synthetic Oligonucleotide
guagacgcuuuguucaaaa

SEQ ID NO: 7217 - RNA, 19 nt, Artificial Sequence
  Synthetic Oligonucleotide
guagacguuuuguccaaaa

SEQ ID NO: 7218 - RNA, 19 nt, Artificial Sequence
  Synthetic Oligonucleotide
guagacgcuuuguucagaa

SEQ ID NO: 7219 - RNA, 19 nt, Artificial Sequence
  Synthetic Oligonucleotide
guagacguuuuguccagaa

SEQ ID NO: 7220 - RNA, 19 nt, Artificial Sequence
  Synthetic Oligonucleotide
guagacgcuucguccaaaa

SEQ ID NO: 7221 - RNA, 19 nt, Artificial Sequence
  Synthetic Oligonucleotide
guagacgauuuguccaaaa

SEQ ID NO: 7222 - RNA, 19 nt, Artificial Sequence
  Synthetic Oligonucleotide
guagacgguuuguccaaaa

SEQ ID NO: 7223 - RNA, 19 nt, Artificial Sequence
  Synthetic Oligonucleotide
guacacgcuuuguccaaaa

SEQ ID NO: 7224 - RNA, 19 nt, Artificial Sequence
  Synthetic Oligonucleotide
guauacgcuuuguccaaaa

SEQ ID NO: 7225 - RNA, 19 nt, Artificial Sequence
  Synthetic Oligonucleotide
guaaacgcuuuguccagaa

SEQ ID NO: 7226 - RNA, 19 nt, Artificial Sequence
  Synthetic Oligonucleotide
guacacucuuuguccaaaa

SEQ ID NO: 7227 - RNA, 19 nt, Artificial Sequence
  Synthetic Oligonucleotide
guauacgauuuguccaaaa

SEQ ID NO: 7228 - RNA, 19 nt, Artificial Sequence
  Synthetic Oligonucleotide
cguagacgcuuuguccaga

SEQ ID NO: 7229 - RNA, 19 nt, Artificial Sequence
  Synthetic Oligonucleotide
cguagacgcuuuguucaaa

SEQ ID NO: 7230 - RNA, 19 nt, Artificial Sequence
  Synthetic Oligonucleotide
cguagacguuuuguccaaa

SEQ ID NO: 7231 - RNA, 19 nt, Artificial Sequence
  Synthetic Oligonucleotide
cguagacgcuuuguucaga

SEQ ID NO: 7232 - RNA, 19 nt, Artificial Sequence
  Synthetic Oligonucleotide
cguagacguuuuguccaga

SEQ ID NO: 7233 - RNA, 19 nt, Artificial Sequence
  Synthetic Oligonucleotide
cguagacgcuucguccaaa

SEQ ID NO: 7234 - RNA, 19 nt, Artificial Sequence
  Synthetic Oligonucleotide
cguagacgauuuguccaaa

SEQ ID NO: 7235 - RNA, 19 nt, Artificial Sequence
  Synthetic Oligonucleotide
cguagacgguuuguccaaa

SEQ ID NO: 7236 - RNA, 19 nt, Artificial Sequence
  Synthetic Oligonucleotide
cguacacgcuuuguccaaa

SEQ ID NO: 7237 - RNA, 19 nt, Artificial Sequence
  Synthetic Oligonucleotide
cguauacgcuuuguccaaa

SEQ ID NO: 7238 - RNA, 19 nt, Artificial Sequence
  Synthetic Oligonucleotide
cguaaacgcuuuguccaga

SEQ ID NO: 7239 - RNA, 19 nt, Artificial Sequence
  Synthetic Oligonucleotide
cguacacucuuuguccaaa

SEQ ID NO: 7240 - RNA, 19 nt, Artificial Sequence
  Synthetic Oligonucleotide
cguauacgauuuguccaaa

SEQ ID NO: 7241 - RNA, 19 nt, Artificial Sequence
  Synthetic Oligonucleotide
agacgcuuuguccagaaug

SEQ ID NO: 7242 - RNA, 19 nt, Artificial Sequence
  Synthetic Oligonucleotide
agacgcuuuguucaaaaug

SEQ ID NO: 7243 - RNA, 19 nt, Artificial Sequence
  Synthetic Oligonucleotide
agacguuuuguccaaaaug

SEQ ID NO: 7244 - RNA, 19 nt, Artificial Sequence
  Synthetic Oligonucleotide
agacgcuuuguucagaaug

SEQ ID NO: 7245 - RNA, 19 nt, Artificial Sequence
  Synthetic Oligonucleotide
agacguuuuguccagaaug

SEQ ID NO: 7246 - RNA, 19 nt, Artificial Sequence
  Synthetic Oligonucleotide
agacgcuuuguccaaaacg

SEQ ID NO: 7247 - RNA, 19 nt, Artificial Sequence
  Synthetic Oligonucleotide
agacgcuucguccaaaaug

SEQ ID NO: 7248 - RNA, 19 nt, Artificial Sequence
  Synthetic Oligonucleotide
agacgauuuguccaaaaug

SEQ ID NO: 7249 - RNA, 19 nt, Artificial Sequence
  Synthetic Oligonucleotide
agacgguuuguccaaaaug

SEQ ID NO: 7250 - RNA, 19 nt, Artificial Sequence
  Synthetic Oligonucleotide
acacgcuuuguccaaaaug

SEQ ID NO: 7251 - RNA, 19 nt, Artificial Sequence
  Synthetic Oligonucleotide
auacgcuuuguccaaaaug

SEQ ID NO: 7252 - RNA, 19 nt, Artificial Sequence
  Synthetic Oligonucleotide
agacgcuuuguccagaacg

SEQ ID NO: 7253 - RNA, 19 nt, Artificial Sequence
  Synthetic Oligonucleotide
aaacgcuuuguccagaaug

SEQ ID NO: 7254 - RNA, 19 nt, Artificial Sequence
  Synthetic Oligonucleotide
acacucuuuguccaaaaug

SEQ ID NO: 7255 - RNA, 19 nt, Artificial Sequence
  Synthetic Oligonucleotide
auacgauuuguccaaaaug

SEQ ID NO: 7256 - RNA, 19 nt, Artificial Sequence
  Synthetic Oligonucleotide
uagacgcuuuguccagaau

SEQ ID NO: 7257 - RNA, 19 nt, Artificial Sequence
  Synthetic Oligonucleotide
uagacgcuuuguucaaaau

SEQ ID NO: 7258 - RNA, 19 nt, Artificial Sequence
  Synthetic Oligonucleotide
uagacguuuuguccaaaau

SEQ ID NO: 7259 - RNA, 19 nt, Artificial Sequence
  Synthetic Oligonucleotide
uagacgcuuuguucagaau

SEQ ID NO: 7260 - RNA, 19 nt, Artificial Sequence
  Synthetic Oligonucleotide
uagacguuuuguccagaau

SEQ ID NO: 7261 - RNA, 19 nt, Artificial Sequence
  Synthetic Oligonucleotide
uagacgcuuuguccaaaac

SEQ ID NO: 7262 - RNA, 19 nt, Artificial Sequence
  Synthetic Oligonucleotide
uagacgcuucguccaaaau

SEQ ID NO: 7263 - RNA, 19 nt, Artificial Sequence
  Synthetic Oligonucleotide
uagacgauuuguccaaaau

SEQ ID NO: 7264 - RNA, 19 nt, Artificial Sequence
  Synthetic Oligonucleotide
uagacgguuuguccaaaau

SEQ ID NO: 7265 - RNA, 19 nt, Artificial Sequence
  Synthetic Oligonucleotide
uacacgcuuuguccaaaau

SEQ ID NO: 7266 - RNA, 19 nt, Artificial Sequence
  Synthetic Oligonucleotide
uauacgcuuuguccaaaau

SEQ ID NO: 7267 - RNA, 19 nt, Artificial Sequence
  Synthetic Oligonucleotide
uagacgcuuuguccagaac

SEQ ID NO: 7268 - RNA, 19 nt, Artificial Sequence
  Synthetic Oligonucleotide
uaaacgcuuuguccagaau

SEQ ID NO: 7269 - RNA, 19 nt, Artificial Sequence
  Synthetic Oligonucleotide
uacacucuuuguccaaaau

SEQ ID NO: 7270 - RNA, 19 nt, Artificial Sequence
  Synthetic Oligonucleotide
uauacgauuuguccaaaau

SEQ ID NO: 7271 - RNA, 19 nt, Artificial Sequence
  Synthetic Oligonucleotide
gacgcuuuguccaaaaugu

SEQ ID NO: 7272 - RNA, 19 nt, Artificial Sequence
  Synthetic Oligonucleotide
gacgcuuuguccagaaugc

SEQ ID NO: 7273 - RNA, 19 nt, Artificial Sequence
  Synthetic Oligonucleotide
gacgcuuuguucaaaaugc

SEQ ID NO: 7274 - RNA, 19 nt, Artificial Sequence
  Synthetic Oligonucleotide
gacguuuuguccaaaaugc

SEQ ID NO: 7275 - RNA, 19 nt, Artificial Sequence
  Synthetic Oligonucleotide
gacgcuuuguucagaaugc

SEQ ID NO: 7276 - RNA, 19 nt, Artificial Sequence
  Synthetic Oligonucleotide
gacguuuuguccagaaugc

SEQ ID NO: 7277 - RNA, 19 nt, Artificial Sequence
  Synthetic Oligonucleotide
gacgcuuuguccaaaacgc

SEQ ID NO: 7278 - RNA, 19 nt, Artificial Sequence
  Synthetic Oligonucleotide
gacgcuucguccaaaaugc

SEQ ID NO: 7279 - RNA, 19 nt, Artificial Sequence
  Synthetic Oligonucleotide
gacgauuuguccaaaaugc

SEQ ID NO: 7280 - RNA, 19 nt, Artificial Sequence
  Synthetic Oligonucleotide
gacgguuuguccaaaaugc

SEQ ID NO: 7281 - RNA, 19 nt, Artificial Sequence
  Synthetic Oligonucleotide
cacgcuuuguccaaaaugc

SEQ ID NO: 7282 - RNA, 19 nt, Artificial Sequence
  Synthetic Oligonucleotide
uacgcuuuguccaaaaugc

SEQ ID NO: 7283 - RNA, 19 nt, Artificial Sequence
  Synthetic Oligonucleotide
gacgcuuuguccagaacgc

SEQ ID NO: 7284 - RNA, 19 nt, Artificial Sequence
  Synthetic Oligonucleotide
aacgcuuuguccagaaugc

SEQ ID NO: 7285 - RNA, 19 nt, Artificial Sequence
  Synthetic Oligonucleotide
cacucuuuguccaaaaugc

SEQ ID NO: 7286 - RNA, 19 nt, Artificial Sequence
  Synthetic Oligonucleotide
uacgauuuguccaaaaugc

SEQ ID NO: 7287 - RNA, 19 nt, Artificial Sequence
  Synthetic Oligonucleotide
auucugcuggugcgcuugc

SEQ ID NO: 7288 - RNA, 19 nt, Artificial Sequence
  Synthetic Oligonucleotide
auucugcuggugcacuagc

SEQ ID NO: 7289 - RNA, 19 nt, Artificial Sequence
  Synthetic Oligonucleotide
auucugcuggugcacucgc

SEQ ID NO: 7290 - RNA, 19 nt, Artificial Sequence
  Synthetic Oligonucleotide
auucugcuggagcacuugc

SEQ ID NO: 7291 - RNA, 19 nt, Artificial Sequence
  Synthetic Oligonucleotide
auucugcuggcgcacuugc

SEQ ID NO: 7292 - RNA, 19 nt, Artificial Sequence
  Synthetic Oligonucleotide
auucugccggugcacuugc

SEQ ID NO: 7293 - RNA, 19 nt, Artificial Sequence
  Synthetic Oligonucleotide
auuccgcuggugcacuugc

SEQ ID NO: 7294 - RNA, 19 nt, Artificial Sequence
  Synthetic Oligonucleotide
auucggcuggugcacuugc

SEQ ID NO: 7295 - RNA, 19 nt, Artificial Sequence
  Synthetic Oligonucleotide
acucugcuggugcacuugc

SEQ ID NO: 7296 - RNA, 19 nt, Artificial Sequence
  Synthetic Oligonucleotide
auucaacuggugcacuugc

SEQ ID NO: 7297 - RNA, 19 nt, Artificial Sequence
  Synthetic Oligonucleotide
acucaacuggugcacuugc

SEQ ID NO: 7298 - RNA, 19 nt, Artificial Sequence
  Synthetic Oligonucleotide
uauucugcuggugcgcuug

SEQ ID NO: 7299 - RNA, 19 nt, Artificial Sequence
  Synthetic Oligonucleotide
uauucugcuggugcacuag

SEQ ID NO: 7300 - RNA, 19 nt, Artificial Sequence
  Synthetic Oligonucleotide
uauucugcuggugcacucg

SEQ ID NO: 7301 - RNA, 19 nt, Artificial Sequence
  Synthetic Oligonucleotide
uauucugcuggagcacuug

SEQ ID NO: 7302 - RNA, 19 nt, Artificial Sequence
  Synthetic Oligonucleotide
uauucugcuggcgcacuug

SEQ ID NO: 7303 - RNA, 19 nt, Artificial Sequence
  Synthetic Oligonucleotide
uauucugccggugcacuug

SEQ ID NO: 7304 - RNA, 19 nt, Artificial Sequence
  Synthetic Oligonucleotide
uauuccgcuggugcacuug

SEQ ID NO: 7305 - RNA, 19 nt, Artificial Sequence
  Synthetic Oligonucleotide
uauucggcuggugcacuug

SEQ ID NO: 7306 - RNA, 19 nt, Artificial Sequence
  Synthetic Oligonucleotide
uacucugcuggugcacuug

SEQ ID NO: 7307 - RNA, 19 nt, Artificial Sequence
  Synthetic Oligonucleotide
uauucaacuggugcacuug

SEQ ID NO: 7308 - RNA, 19 nt, Artificial Sequence
  Synthetic Oligonucleotide
uacucaacuggugcacuug

SEQ ID NO: 7309 - RNA, 19 nt, Artificial Sequence
  Synthetic Oligonucleotide
ucgguuauucugcuggugc

SEQ ID NO: 7310 - RNA, 19 nt, Artificial Sequence
  Synthetic Oligonucleotide
uuaguuauucugcuggugc

SEQ ID NO: 7311 - RNA, 19 nt, Artificial Sequence
  Synthetic Oligonucleotide
ucaguuauucugcuggagc

SEQ ID NO: 7312 - RNA, 19 nt, Artificial Sequence
  Synthetic Oligonucleotide
ucaguuauucugcuggcgc

SEQ ID NO: 7313 - RNA, 19 nt, Artificial Sequence
  Synthetic Oligonucleotide
ucaguuauucugccggugc

SEQ ID NO: 7314 - RNA, 19 nt, Artificial Sequence
  Synthetic Oligonucleotide
ucaguuauuccgcuggugc

SEQ ID NO: 7315 - RNA, 19 nt, Artificial Sequence
  Synthetic Oligonucleotide
ucaguuauucggcuggugc

SEQ ID NO: 7316 - RNA, 19 nt, Artificial Sequence
  Synthetic Oligonucleotide
ucaguuacucugcuggugc

SEQ ID NO: 7317 - RNA, 19 nt, Artificial Sequence
  Synthetic Oligonucleotide
ucagcuauucugcuggugc

SEQ ID NO: 7318 - RNA, 19 nt, Artificial Sequence
  Synthetic Oligonucleotide
ucaguuauucaacuggugc

SEQ ID NO: 7319 - RNA, 19 nt, Artificial Sequence
  Synthetic Oligonucleotide
ucaguuacucaacuggugc

SEQ ID NO: 7320 - RNA, 19 nt, Artificial Sequence
  Synthetic Oligonucleotide
guuauucugcuggugcgcu

SEQ ID NO: 7321 - RNA, 19 nt, Artificial Sequence
  Synthetic Oligonucleotide
guuauucugcuggagcacu

SEQ ID NO: 7322 - RNA, 19 nt, Artificial Sequence
  Synthetic Oligonucleotide
guuauucugcuggcgcacu

SEQ ID NO: 7323 - RNA, 19 nt, Artificial Sequence
  Synthetic Oligonucleotide
guuauucugccggugcacu

SEQ ID NO: 7324 - RNA, 19 nt, Artificial Sequence
  Synthetic Oligonucleotide
guuauuccgcuggugcacu

SEQ ID NO: 7325 - RNA, 19 nt, Artificial Sequence
  Synthetic Oligonucleotide
guuauucggcuggugcacu

SEQ ID NO: 7326 - RNA, 19 nt, Artificial Sequence
  Synthetic Oligonucleotide
guuacucugcuggugcacu

SEQ ID NO: 7327 - RNA, 19 nt, Artificial Sequence
  Synthetic Oligonucleotide
gcuauucugcuggugcacu

SEQ ID NO: 7328 - RNA, 19 nt, Artificial Sequence
  Synthetic Oligonucleotide
guuauucaacuggugcacu

SEQ ID NO: 7329 - RNA, 19 nt, Artificial Sequence
  Synthetic Oligonucleotide
cucgguuauucugcuggug

SEQ ID NO: 7330 - RNA, 19 nt, Artificial Sequence
  Synthetic Oligonucleotide
cuuaguuauucugcuggug

SEQ ID NO: 7331 - RNA, 19 nt, Artificial Sequence
  Synthetic Oligonucleotide
uucaguuauucugcuggug

SEQ ID NO: 7332 - RNA, 19 nt, Artificial Sequence
  Synthetic Oligonucleotide
cucaguuauucugcuggag

SEQ ID NO: 7333 - RNA, 19 nt, Artificial Sequence
  Synthetic Oligonucleotide
cucaguuauucugcuggcg

SEQ ID NO: 7334 - RNA, 19 nt, Artificial Sequence
  Synthetic Oligonucleotide
cucaguuauucugccggug

SEQ ID NO: 7335 - RNA, 19 nt, Artificial Sequence
  Synthetic Oligonucleotide
cucaguuauuccgcuggug

SEQ ID NO: 7336 - RNA, 19 nt, Artificial Sequence
  Synthetic Oligonucleotide
cucaguuauucggcuggug

SEQ ID NO: 7337 - RNA, 19 nt, Artificial Sequence
  Synthetic Oligonucleotide
cucaguuacucugcuggug

SEQ ID NO: 7338 - RNA, 19 nt, Artificial Sequence
  Synthetic Oligonucleotide
cucagcuauucugcuggug

SEQ ID NO: 7339 - RNA, 19 nt, Artificial Sequence
  Synthetic Oligonucleotide
cucaguuauucaacuggug

SEQ ID NO: 7340 - RNA, 19 nt, Artificial Sequence
  Synthetic Oligonucleotide
cucaguuacucaacuggug

SEQ ID NO: 7341 - RNA, 19 nt, Artificial Sequence
  Synthetic Oligonucleotide
aguuauucugcuggugcgc

SEQ ID NO: 7342 - RNA, 19 nt, Artificial Sequence
  Synthetic Oligonucleotide
gguuauucugcuggugcac

SEQ ID NO: 7343 - RNA, 19 nt, Artificial Sequence
  Synthetic Oligonucleotide
aguuauucugcuggagcac

SEQ ID NO: 7344 - RNA, 19 nt, Artificial Sequence
  Synthetic Oligonucleotide
aguuauucugcuggcgcac

SEQ ID NO: 7345 - RNA, 19 nt, Artificial Sequence
  Synthetic Oligonucleotide
aguuauucugccggugcac

SEQ ID NO: 7346 - RNA, 19 nt, Artificial Sequence
  Synthetic Oligonucleotide
aguuauuccgcuggugcac

SEQ ID NO: 7347 - RNA, 19 nt, Artificial Sequence
  Synthetic Oligonucleotide
aguuauucggcuggugcac

SEQ ID NO: 7348 - RNA, 19 nt, Artificial Sequence
  Synthetic Oligonucleotide
aguuacucugcuggugcac

SEQ ID NO: 7349 - RNA, 19 nt, Artificial Sequence
  Synthetic Oligonucleotide
agcuauucugcuggugcac

SEQ ID NO: 7350 - RNA, 19 nt, Artificial Sequence
  Synthetic Oligonucleotide
aguuauucaacuggugcac

SEQ ID NO: 7351 - RNA, 19 nt, Artificial Sequence
  Synthetic Oligonucleotide
acgcuuuguccaaaaugcu

SEQ ID NO: 7352 - RNA, 19 nt, Artificial Sequence
  Synthetic Oligonucleotide
acgcuuuguccaaaauguc

SEQ ID NO: 7353 - RNA, 19 nt, Artificial Sequence
  Synthetic Oligonucleotide
acgcuuuguccagaaugcc

SEQ ID NO: 7354 - RNA, 19 nt, Artificial Sequence
  Synthetic Oligonucleotide
acgcuuuguucaaaaugcc

SEQ ID NO: 7355 - RNA, 19 nt, Artificial Sequence
  Synthetic Oligonucleotide
acguuuuguccaaaaugcc

SEQ ID NO: 7356 - RNA, 19 nt, Artificial Sequence
  Synthetic Oligonucleotide
acgcuuuguucagaaugcc

SEQ ID NO: 7357 - RNA, 19 nt, Artificial Sequence
  Synthetic Oligonucleotide
acguuuuguccagaaugcc

SEQ ID NO: 7358 - RNA, 19 nt, Artificial Sequence
  Synthetic Oligonucleotide
acgcuuuguccaaaaugca

SEQ ID NO: 7359 - RNA, 19 nt, Artificial Sequence
  Synthetic Oligonucleotide
acgcuuuguccaaaacgcc

SEQ ID NO: 7360 - RNA, 19 nt, Artificial Sequence
  Synthetic Oligonucleotide
acgcuucguccaaaaugcc

SEQ ID NO: 7361 - RNA, 19 nt, Artificial Sequence
  Synthetic Oligonucleotide
acgauuuguccaaaaugcc

SEQ ID NO: 7362 - RNA, 19 nt, Artificial Sequence
  Synthetic Oligonucleotide
acgguuuguccaaaaugcc

SEQ ID NO: 7363 - RNA, 19 nt, Artificial Sequence
  Synthetic Oligonucleotide
acucuuuguccaaaaugcc

SEQ ID NO: 7364 - RNA, 19 nt, Artificial Sequence
  Synthetic Oligonucleotide
acgcuuuguccagaacgcc

SEQ ID NO: 7365 - RNA, 19 nt, Artificial Sequence
  Synthetic Oligonucleotide
acgcuuuguccagaacgcu

SEQ ID NO: 7366 - RNA, 19 nt, Artificial Sequence
  Synthetic Oligonucleotide
gcuuuguccaaaaugcucu

SEQ ID NO: 7367 - RNA, 19 nt, Artificial Sequence
  Synthetic Oligonucleotide
gcuuuguccaaaauguccu

SEQ ID NO: 7368 - RNA, 19 nt, Artificial Sequence
  Synthetic Oligonucleotide
gcuuuguccagaaugcccu

SEQ ID NO: 7369 - RNA, 19 nt, Artificial Sequence
  Synthetic Oligonucleotide
gcuuuguucaaaaugcccu

SEQ ID NO: 7370 - RNA, 19 nt, Artificial Sequence
  Synthetic Oligonucleotide
guuuuguccaaaaugcccu

SEQ ID NO: 7371 - RNA, 19 nt, Artificial Sequence
  Synthetic Oligonucleotide
gcuuuguucagaaugcccu

SEQ ID NO: 7372 - RNA, 19 nt, Artificial Sequence
  Synthetic Oligonucleotide
guuuuguccagaaugcccu

SEQ ID NO: 7373 - RNA, 19 nt, Artificial Sequence
  Synthetic Oligonucleotide
gcuuuguccaaaaugcacu

SEQ ID NO: 7374 - RNA, 19 nt, Artificial Sequence
  Synthetic Oligonucleotide
gcuuuguccaaaacgcccu

SEQ ID NO: 7375 - RNA, 19 nt, Artificial Sequence
  Synthetic Oligonucleotide
gcuucguccaaaaugcccu

SEQ ID NO: 7376 - RNA, 19 nt, Artificial Sequence
  Synthetic Oligonucleotide
gauuuguccaaaaugcccu

SEQ ID NO: 7377 - RNA, 19 nt, Artificial Sequence
  Synthetic Oligonucleotide
gguuuguccaaaaugcccu

SEQ ID NO: 7378 - RNA, 19 nt, Artificial Sequence
  Synthetic Oligonucleotide
ucuuuguccaaaaugcccu

SEQ ID NO: 7379 - RNA, 19 nt, Artificial Sequence
  Synthetic Oligonucleotide
gcuuuguccagaacgcccu

SEQ ID NO: 7380 - RNA, 19 nt, Artificial Sequence
  Synthetic Oligonucleotide
gcuuuguccagaacgcucu

SEQ ID NO: 7381 - RNA, 19 nt, Artificial Sequence
  Synthetic Oligonucleotide
cgcuuuguccaaaaugcuc

SEQ ID NO: 7382 - RNA, 19 nt, Artificial Sequence
  Synthetic Oligonucleotide
cgcuuuguccaaaaugucc

SEQ ID NO: 7383 - RNA, 19 nt, Artificial Sequence
  Synthetic Oligonucleotide
cgcuuuguccagaaugccc

SEQ ID NO: 7384 - RNA, 19 nt, Artificial Sequence
  Synthetic Oligonucleotide
cgcuuuguucaaaaugccc

SEQ ID NO: 7385 - RNA, 19 nt, Artificial Sequence
  Synthetic Oligonucleotide
cguuuuguccaaaaugccc

SEQ ID NO: 7386 - RNA, 19 nt, Artificial Sequence
  Synthetic Oligonucleotide
cgcuuuguucagaaugccc

SEQ ID NO: 7387 - RNA, 19 nt, Artificial Sequence
  Synthetic Oligonucleotide
cguuuuguccagaaugccc

SEQ ID NO: 7388 - RNA, 19 nt, Artificial Sequence
  Synthetic Oligonucleotide
cgcuuuguccaaaaugcac

SEQ ID NO: 7389 - RNA, 19 nt, Artificial Sequence
  Synthetic Oligonucleotide
cgcuuuguccaaaacgccc

SEQ ID NO: 7390 - RNA, 19 nt, Artificial Sequence
  Synthetic Oligonucleotide
cgcuucguccaaaaugccc

SEQ ID NO: 7391 - RNA, 19 nt, Artificial Sequence
  Synthetic Oligonucleotide
cgauuuguccaaaaugccc

SEQ ID NO: 7392 - RNA, 19 nt, Artificial Sequence
  Synthetic Oligonucleotide
cgguuuguccaaaaugccc

SEQ ID NO: 7393 - RNA, 19 nt, Artificial Sequence
  Synthetic Oligonucleotide
cucuuuguccaaaaugccc

SEQ ID NO: 7394 - RNA, 19 nt, Artificial Sequence
  Synthetic Oligonucleotide
cgcuuuguccagaacgccc

SEQ ID NO: 7395 - RNA, 19 nt, Artificial Sequence
  Synthetic Oligonucleotide
cgcuuuguccagaacgcuc

SEQ ID NO: 7396 - RNA, 19 nt, Artificial Sequence
  Synthetic Oligonucleotide
agucuaugagggaagagua

SEQ ID NO: 7397 - RNA, 19 nt, Artificial Sequence
  Synthetic Oligonucleotide
agucuaugagggaggaaua

SEQ ID NO: 7398 - RNA, 19 nt, Artificial Sequence
  Synthetic Oligonucleotide
agucuaugggggaagaaua

SEQ ID NO: 7399 - RNA, 19 nt, Artificial Sequence
  Synthetic Oligonucleotide
aguuuaugagggaagaaua

SEQ ID NO: 7400 - RNA, 19 nt, Artificial Sequence
  Synthetic Oligonucleotide
agucuaugagggaggagua

SEQ ID NO: 7401 - RNA, 19 nt, Artificial Sequence
  Synthetic Oligonucleotide
agucuaugagggaacaaua

SEQ ID NO: 7402 - RNA, 19 nt, Artificial Sequence
  Synthetic Oligonucleotide
agucuuugagggaagaaua

SEQ ID NO: 7403 - RNA, 19 nt, Artificial Sequence
  Synthetic Oligonucleotide
aguccaugagggaagaaua

SEQ ID NO: 7404 - RNA, 19 nt, Artificial Sequence
  Synthetic Oligonucleotide
aguccaugagggaagagua

SEQ ID NO: 7405 - RNA, 19 nt, Artificial Sequence
  Synthetic Oligonucleotide
agucuacuagggaagaaua

SEQ ID NO: 7406 - RNA, 19 nt, Artificial Sequence
  Synthetic Oligonucleotide
uuauucugcuggugcgcuu

SEQ ID NO: 7407 - RNA, 19 nt, Artificial Sequence
  Synthetic Oligonucleotide
uuauucugcuggugcacua

SEQ ID NO: 7408 - RNA, 19 nt, Artificial Sequence
  Synthetic Oligonucleotide
uuauucugcuggugcacuc

SEQ ID NO: 7409 - RNA, 19 nt, Artificial Sequence
  Synthetic Oligonucleotide
uuauucugcuggagcacuu

SEQ ID NO: 7410 - RNA, 19 nt, Artificial Sequence
  Synthetic Oligonucleotide
uuauucugcuggcgcacuu

SEQ ID NO: 7411 - RNA, 19 nt, Artificial Sequence
  Synthetic Oligonucleotide
uuauucugccggugcacuu

SEQ ID NO: 7412 - RNA, 19 nt, Artificial Sequence
  Synthetic Oligonucleotide
uuauuccgcuggugcacuu

SEQ ID NO: 7413 - RNA, 19 nt, Artificial Sequence
  Synthetic Oligonucleotide
uuauucggcuggugcacuu

SEQ ID NO: 7414 - RNA, 19 nt, Artificial Sequence
  Synthetic Oligonucleotide
uuacucugcuggugcacuu

SEQ ID NO: 7415 - RNA, 19 nt, Artificial Sequence
  Synthetic Oligonucleotide
cuauucugcuggugcacuu

SEQ ID NO: 7416 - RNA, 19 nt, Artificial Sequence
  Synthetic Oligonucleotide
uuauucaacuggugcacuu

SEQ ID NO: 7417 - RNA, 19 nt, Artificial Sequence
  Synthetic Oligonucleotide
caccucugacuagggggau

SEQ ID NO: 7418 - RNA, 19 nt, Artificial Sequence
  Synthetic Oligonucleotide
cacuucugacuaaggggau

SEQ ID NO: 7419 - RNA, 19 nt, Artificial Sequence
  Synthetic Oligonucleotide
cgccucugacuaaggggau

SEQ ID NO: 7420 - RNA, 19 nt, Artificial Sequence
  Synthetic Oligonucleotide
caccucugacuaagggaau

SEQ ID NO: 7421 - RNA, 19 nt, Artificial Sequence
  Synthetic Oligonucleotide
caccucugacuaaggguau

SEQ ID NO: 7422 - RNA, 19 nt, Artificial Sequence
  Synthetic Oligonucleotide
caccucugacuaaagggau

SEQ ID NO: 7423 - RNA, 19 nt, Artificial Sequence
  Synthetic Oligonucleotide
caccucugacaaaggggau

SEQ ID NO: 7424 - RNA, 19 nt, Artificial Sequence
  Synthetic Oligonucleotide
caccucugaccaaggggau

SEQ ID NO: 7425 - RNA, 19 nt, Artificial Sequence
  Synthetic Oligonucleotide
caccucuaacuaaggggau

SEQ ID NO: 7426 - RNA, 19 nt, Artificial Sequence
  Synthetic Oligonucleotide
caccucuuacuaaggggau

SEQ ID NO: 7427 - RNA, 19 nt, Artificial Sequence
  Synthetic Oligonucleotide
cuccucugacuaaggggau

SEQ ID NO: 7428 - RNA, 19 nt, Artificial Sequence
  Synthetic Oligonucleotide
caccuuugacuaaagggau

SEQ ID NO: 7429 - RNA, 19 nt, Artificial Sequence
  Synthetic Oligonucleotide
caccucugacaaaagggau

SEQ ID NO: 7430 - RNA, 19 nt, Artificial Sequence
  Synthetic Oligonucleotide
caccucugaccaagggaau

SEQ ID NO: 7431 - RNA, 19 nt, Artificial Sequence
  Synthetic Oligonucleotide
caccacugacuaagggaau

SEQ ID NO: 7432 - RNA, 19 nt, Artificial Sequence
  Synthetic Oligonucleotide
gucaccucugacuaggggg

SEQ ID NO: 7433 - RNA, 19 nt, Artificial Sequence
  Synthetic Oligonucleotide
gucacuucugacuaagggg

SEQ ID NO: 7434 - RNA, 19 nt, Artificial Sequence
  Synthetic Oligonucleotide
gucgccucugacuaagggg

SEQ ID NO: 7435 - RNA, 19 nt, Artificial Sequence
  Synthetic Oligonucleotide
gucaccucugacuaaggga

SEQ ID NO: 7436 - RNA, 19 nt, Artificial Sequence
  Synthetic Oligonucleotide
gucaccucugacuaagggu

SEQ ID NO: 7437 - RNA, 19 nt, Artificial Sequence
  Synthetic Oligonucleotide
gucaccucugacuaaaggg

SEQ ID NO: 7438 - RNA, 19 nt, Artificial Sequence
  Synthetic Oligonucleotide
gucaccucugacaaagggg

SEQ ID NO: 7439 - RNA, 19 nt, Artificial Sequence
  Synthetic Oligonucleotide
gucaccucugaccaagggg

SEQ ID NO: 7440 - RNA, 19 nt, Artificial Sequence
  Synthetic Oligonucleotide
gucaccucuaacuaagggg

SEQ ID NO: 7441 - RNA, 19 nt, Artificial Sequence
  Synthetic Oligonucleotide
gucaccucuuacuaagggg

SEQ ID NO: 7442 - RNA, 19 nt, Artificial Sequence
  Synthetic Oligonucleotide
gucuccucugacuaagggg

SEQ ID NO: 7443 - RNA, 19 nt, Artificial Sequence
  Synthetic Oligonucleotide
gucaccuuugacuaaaggg

SEQ ID NO: 7444 - RNA, 19 nt, Artificial Sequence
  Synthetic Oligonucleotide
gucaccucugacaaaaggg

SEQ ID NO: 7445 - RNA, 19 nt, Artificial Sequence
  Synthetic Oligonucleotide
gucaccucugaccaaggga

SEQ ID NO: 7446 - RNA, 19 nt, Artificial Sequence
  Synthetic Oligonucleotide
gucaccacugacuaaggga

SEQ ID NO: 7447 - RNA, 19 nt, Artificial Sequence
  Synthetic Oligonucleotide
ucaccucugacuaggggga

SEQ ID NO: 7448 - RNA, 19 nt, Artificial Sequence
  Synthetic Oligonucleotide
ucacuucugacuaagggga

SEQ ID NO: 7449 - RNA, 19 nt, Artificial Sequence
  Synthetic Oligonucleotide
ucgccucugacuaagggga

SEQ ID NO: 7450 - RNA, 19 nt, Artificial Sequence
  Synthetic Oligonucleotide
ucaccucugacuaagggaa

SEQ ID NO: 7451 - RNA, 19 nt, Artificial Sequence
  Synthetic Oligonucleotide
ucaccucugacuaagggua

SEQ ID NO: 7452 - RNA, 19 nt, Artificial Sequence
  Synthetic Oligonucleotide
ucaccucugacuaaaggga

SEQ ID NO: 7453 - RNA, 19 nt, Artificial Sequence
  Synthetic Oligonucleotide
ucaccucugacaaagggga

SEQ ID NO: 7454 - RNA, 19 nt, Artificial Sequence
  Synthetic Oligonucleotide
ucaccucugaccaagggga

SEQ ID NO: 7455 - RNA, 19 nt, Artificial Sequence
  Synthetic Oligonucleotide
ucaccucuaacuaagggga

SEQ ID NO: 7456 - RNA, 19 nt, Artificial Sequence
  Synthetic Oligonucleotide
ucaccucuuacuaagggga

SEQ ID NO: 7457 - RNA, 19 nt, Artificial Sequence
  Synthetic Oligonucleotide
ucuccucugacuaagggga

SEQ ID NO: 7458 - RNA, 19 nt, Artificial Sequence
  Synthetic Oligonucleotide
ucaccuuugacuaaaggga

SEQ ID NO: 7459 - RNA, 19 nt, Artificial Sequence
  Synthetic Oligonucleotide
ucaccucugacaaaaggga

SEQ ID NO: 7460 - RNA, 19 nt, Artificial Sequence
  Synthetic Oligonucleotide
ucaccucugaccaagggaa

SEQ ID NO: 7461 - RNA, 19 nt, Artificial Sequence
  Synthetic Oligonucleotide
ucaccacugacuaagggaa

SEQ ID NO: 7462 - RNA, 19 nt, Artificial Sequence
  Synthetic Oligonucleotide
gucuaugagggaagaguau

SEQ ID NO: 7463 - RNA, 19 nt, Artificial Sequence
  Synthetic Oligonucleotide
gucuaugagggaggaauau

SEQ ID NO: 7464 - RNA, 19 nt, Artificial Sequence
  Synthetic Oligonucleotide
gucuaugggggaagaauau

SEQ ID NO: 7465 - RNA, 19 nt, Artificial Sequence
  Synthetic Oligonucleotide
guuuaugagggaagaauau

SEQ ID NO: 7466 - RNA, 19 nt, Artificial Sequence
  Synthetic Oligonucleotide
gucuaugagggaggaguau

SEQ ID NO: 7467 - RNA, 19 nt, Artificial Sequence
  Synthetic Oligonucleotide
gucuaugagggaagaauac

SEQ ID NO: 7468 - RNA, 19 nt, Artificial Sequence
  Synthetic Oligonucleotide
gucuaugagggaacaauau

SEQ ID NO: 7469 - RNA, 19 nt, Artificial Sequence
  Synthetic Oligonucleotide
gucuuugagggaagaauau

SEQ ID NO: 7470 - RNA, 19 nt, Artificial Sequence
  Synthetic Oligonucleotide
guccaugagggaagaauau

SEQ ID NO: 7471 - RNA, 19 nt, Artificial Sequence
  Synthetic Oligonucleotide
gucuaugagggaagaguac

SEQ ID NO: 7472 - RNA, 19 nt, Artificial Sequence
  Synthetic Oligonucleotide
guccaugagggaagaguau

SEQ ID NO: 7473 - RNA, 19 nt, Artificial Sequence
  Synthetic Oligonucleotide
gucuacuagggaagaauau

SEQ ID NO: 7474 - RNA, 19 nt, Artificial Sequence
  Synthetic Oligonucleotide
ucuaugagggaagaguauc

SEQ ID NO: 7475 - RNA, 19 nt, Artificial Sequence
  Synthetic Oligonucleotide
ucuaugagggaggaauauc

SEQ ID NO: 7476 - RNA, 19 nt, Artificial Sequence
  Synthetic Oligonucleotide
ucuaugggggaagaauauc

SEQ ID NO: 7477 - RNA, 19 nt, Artificial Sequence
  Synthetic Oligonucleotide
ucuaugagggaggaguauc

SEQ ID NO: 7478 - RNA, 19 nt, Artificial Sequence
  Synthetic Oligonucleotide
ucuaugagggaagaauacc

SEQ ID NO: 7479 - RNA, 19 nt, Artificial Sequence
  Synthetic Oligonucleotide
ucuuugagggaagaauauc

SEQ ID NO: 7480 - RNA, 19 nt, Artificial Sequence
  Synthetic Oligonucleotide
uccaugagggaagaauauc

SEQ ID NO: 7481 - RNA, 19 nt, Artificial Sequence
  Synthetic Oligonucleotide
ucuaugagggaagaguacc

SEQ ID NO: 7482 - RNA, 19 nt, Artificial Sequence
  Synthetic Oligonucleotide
ucuaugagggaacaauauu

SEQ ID NO: 7483 - RNA, 19 nt, Artificial Sequence
  Synthetic Oligonucleotide
uccaugagggaagaguauc

SEQ ID NO: 7484 - RNA, 19 nt, Artificial Sequence
  Synthetic Oligonucleotide
uuuaugagggaagaauaug

SEQ ID NO: 7485 - RNA, 19 nt, Artificial Sequence
  Synthetic Oligonucleotide
ucuacuagggaagaauauc

SEQ ID NO: 7486 - RNA, 19 nt, Artificial Sequence
  Synthetic Oligonucleotide
cggcuaaggcuauggagca

SEQ ID NO: 7487 - RNA, 19 nt, Artificial Sequence
  Synthetic Oligonucleotide
cagcuaaggcuauggaaca

SEQ ID NO: 7488 - RNA, 19 nt, Artificial Sequence
  Synthetic Oligonucleotide
cagcuaaggccauggagca

SEQ ID NO: 7489 - RNA, 19 nt, Artificial Sequence
  Synthetic Oligonucleotide
cagcuaaagcuauggagca

SEQ ID NO: 7490 - RNA, 19 nt, Artificial Sequence
  Synthetic Oligonucleotide
cagccaaggcuauggagca

SEQ ID NO: 7491 - RNA, 19 nt, Artificial Sequence
  Synthetic Oligonucleotide
cagcgaaggcuauggagca

SEQ ID NO: 7492 - RNA, 19 nt, Artificial Sequence
  Synthetic Oligonucleotide
ccgcuaaggcuauggagca

SEQ ID NO: 7493 - RNA, 19 nt, Artificial Sequence
  Synthetic Oligonucleotide
cggcuaaggccauggagca

SEQ ID NO: 7494 - RNA, 19 nt, Artificial Sequence
  Synthetic Oligonucleotide
cagcuaaggccauggaaca

SEQ ID NO: 7495 - RNA, 19 nt, Artificial Sequence
  Synthetic Oligonucleotide
cagcuaaagccauggagca

SEQ ID NO: 7496 - RNA, 19 nt, Artificial Sequence
  Synthetic Oligonucleotide
cagcuaaagcgauggagca

SEQ ID NO: 7497 - RNA, 19 nt, Artificial Sequence
  Synthetic Oligonucleotide
cagcuuaugcuauggagca

SEQ ID NO: 7498 - RNA, 19 nt, Artificial Sequence
  Synthetic Oligonucleotide
cagccaaggcuauggaaca

SEQ ID NO: 7499 - RNA, 19 nt, Artificial Sequence
  Synthetic Oligonucleotide
cggcuaaagccauggagca

SEQ ID NO: 7500 - RNA, 19 nt, Artificial Sequence
  Synthetic Oligonucleotide
cagcuaaagccauggaaca

SEQ ID NO: 7501 - RNA, 19 nt, Artificial Sequence
  Synthetic Oligonucleotide
cuaugagggaagaguaucg

SEQ ID NO: 7502 - RNA, 19 nt, Artificial Sequence
  Synthetic Oligonucleotide
cuaugagggaggaauaucg

SEQ ID NO: 7503 - RNA, 19 nt, Artificial Sequence
  Synthetic Oligonucleotide
cuaugggggaagaauaucg

SEQ ID NO: 7504 - RNA, 19 nt, Artificial Sequence
  Synthetic Oligonucleotide
cuaugagggaggaguaucg

SEQ ID NO: 7505 - RNA, 19 nt, Artificial Sequence
  Synthetic Oligonucleotide
cuaugagggaagaauauca

SEQ ID NO: 7506 - RNA, 19 nt, Artificial Sequence
  Synthetic Oligonucleotide
cuaugagggaagaauaccg

SEQ ID NO: 7507 - RNA, 19 nt, Artificial Sequence
  Synthetic Oligonucleotide
cuuugagggaagaauaucg

SEQ ID NO: 7508 - RNA, 19 nt, Artificial Sequence
  Synthetic Oligonucleotide
ccaugagggaagaauaucg

SEQ ID NO: 7509 - RNA, 19 nt, Artificial Sequence
  Synthetic Oligonucleotide
cuaugagggaagaguaccg

SEQ ID NO: 7510 - RNA, 19 nt, Artificial Sequence
  Synthetic Oligonucleotide
cuaugagggaacaauauug

SEQ ID NO: 7511 - RNA, 19 nt, Artificial Sequence
  Synthetic Oligonucleotide
uuaugagggaagaauaugg

SEQ ID NO: 7512 - RNA, 19 nt, Artificial Sequence
  Synthetic Oligonucleotide
cuacuagggaagaauaucg

SEQ ID NO: 7513 - RNA, 19 nt, Artificial Sequence
  Synthetic Oligonucleotide
ccaugagggaagaauauca

SEQ ID NO: 7514 - RNA, 19 nt, Artificial Sequence
  Synthetic Oligonucleotide
cuaugagggaagaguacca

SEQ ID NO: 7515 - RNA, 19 nt, Artificial Sequence
  Synthetic Oligonucleotide
ccaugagggaagaguauca

SEQ ID NO: 7516 - RNA, 19 nt, Artificial Sequence
  Synthetic Oligonucleotide
acggcuaaggcuauggagc

SEQ ID NO: 7517 - RNA, 19 nt, Artificial Sequence
  Synthetic Oligonucleotide
acagcuaaggcuauggaac

SEQ ID NO: 7518 - RNA, 19 nt, Artificial Sequence
  Synthetic Oligonucleotide
acagcuaaggccauggagc

SEQ ID NO: 7519 - RNA, 19 nt, Artificial Sequence
  Synthetic Oligonucleotide
acagcuaaagcuauggagc

SEQ ID NO: 7520 - RNA, 19 nt, Artificial Sequence
  Synthetic Oligonucleotide
acagccaaggcuauggagc

SEQ ID NO: 7521 - RNA, 19 nt, Artificial Sequence
  Synthetic Oligonucleotide
acagcgaaggcuauggagc

SEQ ID NO: 7522 - RNA, 19 nt, Artificial Sequence
  Synthetic Oligonucleotide
accgcuaaggcuauggagc

SEQ ID NO: 7523 - RNA, 19 nt, Artificial Sequence
  Synthetic Oligonucleotide
acggcuaaggccauggagc

SEQ ID NO: 7524 - RNA, 19 nt, Artificial Sequence
  Synthetic Oligonucleotide
acagcuaaggccauggaac

SEQ ID NO: 7525 - RNA, 19 nt, Artificial Sequence
  Synthetic Oligonucleotide
acagcuaaagccauggagc

SEQ ID NO: 7526 - RNA, 19 nt, Artificial Sequence
  Synthetic Oligonucleotide
acagcuaaagcgauggagc

SEQ ID NO: 7527 - RNA, 19 nt, Artificial Sequence
  Synthetic Oligonucleotide
acagcuuaugcuauggagc

SEQ ID NO: 7528 - RNA, 19 nt, Artificial Sequence
  Synthetic Oligonucleotide
acagccaaggcuauggaac

SEQ ID NO: 7529 - RNA, 19 nt, Artificial Sequence
  Synthetic Oligonucleotide
acggcuaaagccauggagc

SEQ ID NO: 7530 - RNA, 19 nt, Artificial Sequence
  Synthetic Oligonucleotide
caguuauucugcuggugcg

SEQ ID NO: 7531 - RNA, 19 nt, Artificial Sequence
  Synthetic Oligonucleotide
cgguuauucugcuggugca

SEQ ID NO: 7532 - RNA, 19 nt, Artificial Sequence
  Synthetic Oligonucleotide
uaguuauucugcuggugca

SEQ ID NO: 7533 - RNA, 19 nt, Artificial Sequence
  Synthetic Oligonucleotide
caguuauucugcuggagca

SEQ ID NO: 7534 - RNA, 19 nt, Artificial Sequence
  Synthetic Oligonucleotide
caguuauucugcuggcgca

SEQ ID NO: 7535 - RNA, 19 nt, Artificial Sequence
  Synthetic Oligonucleotide
caguuauucugccggugca

SEQ ID NO: 7536 - RNA, 19 nt, Artificial Sequence
  Synthetic Oligonucleotide
caguuauuccgcuggugca

SEQ ID NO: 7537 - RNA, 19 nt, Artificial Sequence
  Synthetic Oligonucleotide
caguuauucggcuggugca

SEQ ID NO: 7538 - RNA, 19 nt, Artificial Sequence
  Synthetic Oligonucleotide
caguuacucugcuggugca

SEQ ID NO: 7539 - RNA, 19 nt, Artificial Sequence
  Synthetic Oligonucleotide
cagcuauucugcuggugca

SEQ ID NO: 7540 - RNA, 19 nt, Artificial Sequence
  Synthetic Oligonucleotide
caguuauucaacuggugca

SEQ ID NO: 7541 - RNA, 19 nt, Artificial Sequence
  Synthetic Oligonucleotide
acuacggcuaaggcuaugg

SEQ ID NO: 7542 - RNA, 19 nt, Artificial Sequence
  Synthetic Oligonucleotide
acuacagcuaaggccaugg

SEQ ID NO: 7543 - RNA, 19 nt, Artificial Sequence
  Synthetic Oligonucleotide
acuacagcuaaagcuaugg

SEQ ID NO: 7544 - RNA, 19 nt, Artificial Sequence
  Synthetic Oligonucleotide
acuacagccaaggcuaugg

SEQ ID NO: 7545 - RNA, 19 nt, Artificial Sequence
  Synthetic Oligonucleotide
acuacagcgaaggcuaugg

SEQ ID NO: 7546 - RNA, 19 nt, Artificial Sequence
  Synthetic Oligonucleotide
acuaccgcuaaggcuaugg

SEQ ID NO: 7547 - RNA, 19 nt, Artificial Sequence
  Synthetic Oligonucleotide
acaacagcuaaggcuaugg

SEQ ID NO: 7548 - RNA, 19 nt, Artificial Sequence
  Synthetic Oligonucleotide
accacagcuaaggcuaugg

SEQ ID NO: 7549 - RNA, 19 nt, Artificial Sequence
  Synthetic Oligonucleotide
aauacagcuaaggcuaugg

SEQ ID NO: 7550 - RNA, 19 nt, Artificial Sequence
  Synthetic Oligonucleotide
acuacggcuaaggccaugg

SEQ ID NO: 7551 - RNA, 19 nt, Artificial Sequence
  Synthetic Oligonucleotide
auuacagcuaaagcuaugg

SEQ ID NO: 7552 - RNA, 19 nt, Artificial Sequence
  Synthetic Oligonucleotide
acuacagcuaaagccaugg

SEQ ID NO: 7553 - RNA, 19 nt, Artificial Sequence
  Synthetic Oligonucleotide
acuacagcuaaagcgaugg

SEQ ID NO: 7554 - RNA, 19 nt, Artificial Sequence
  Synthetic Oligonucleotide
acuacagcuuaugcuaugg

SEQ ID NO: 7555 - RNA, 19 nt, Artificial Sequence
  Synthetic Oligonucleotide
acaacagcuaaggccaugg

SEQ ID NO: 7556 - RNA, 19 nt, Artificial Sequence
  Synthetic Oligonucleotide
accacggcuaaggccaugg

SEQ ID NO: 7557 - RNA, 19 nt, Artificial Sequence
  Synthetic Oligonucleotide
acaacagcuaaagccaugg

SEQ ID NO: 7558 - RNA, 19 nt, Artificial Sequence
  Synthetic Oligonucleotide
cuacggcuaaggcuaugga

SEQ ID NO: 7559 - RNA, 19 nt, Artificial Sequence
  Synthetic Oligonucleotide
cuacagcuaaggccaugga

SEQ ID NO: 7560 - RNA, 19 nt, Artificial Sequence
  Synthetic Oligonucleotide
cuacagcuaaagcuaugga

SEQ ID NO: 7561 - RNA, 19 nt, Artificial Sequence
  Synthetic Oligonucleotide
cuacagccaaggcuaugga

SEQ ID NO: 7562 - RNA, 19 nt, Artificial Sequence
  Synthetic Oligonucleotide
cuacagcgaaggcuaugga

SEQ ID NO: 7563 - RNA, 19 nt, Artificial Sequence
  Synthetic Oligonucleotide
cuaccgcuaaggcuaugga

SEQ ID NO: 7564 - RNA, 19 nt, Artificial Sequence
  Synthetic Oligonucleotide
caacagcuaaggcuaugga

SEQ ID NO: 7565 - RNA, 19 nt, Artificial Sequence
  Synthetic Oligonucleotide
ccacagcuaaggcuaugga

SEQ ID NO: 7566 - RNA, 19 nt, Artificial Sequence
  Synthetic Oligonucleotide
auacagcuaaggcuaugga

SEQ ID NO: 7567 - RNA, 19 nt, Artificial Sequence
  Synthetic Oligonucleotide
cuacggcuaaggccaugga

SEQ ID NO: 7568 - RNA, 19 nt, Artificial Sequence
  Synthetic Oligonucleotide
uuacagcuaaagcuaugga

SEQ ID NO: 7569 - RNA, 19 nt, Artificial Sequence
  Synthetic Oligonucleotide
cuacagcuaaagccaugga

SEQ ID NO: 7570 - RNA, 19 nt, Artificial Sequence
  Synthetic Oligonucleotide
cuacagcuaaagcgaugga

SEQ ID NO: 7571 - RNA, 19 nt, Artificial Sequence
  Synthetic Oligonucleotide
cuacagcuuaugcuaugga

SEQ ID NO: 7572 - RNA, 19 nt, Artificial Sequence
  Synthetic Oligonucleotide
caacagcuaaggccaugga

SEQ ID NO: 7573 - RNA, 19 nt, Artificial Sequence
  Synthetic Oligonucleotide
ccacggcuaaggccaugga

SEQ ID NO: 7574 - RNA, 19 nt, Artificial Sequence
  Synthetic Oligonucleotide
caacagcuaaagccaugga

SEQ ID NO: 7575 - RNA, 19 nt, Artificial Sequence
  Synthetic Oligonucleotide
agcacuacggcuaaggcua

SEQ ID NO: 7576 - RNA, 19 nt, Artificial Sequence
  Synthetic Oligonucleotide
aguacuacagcuaaggcua

SEQ ID NO: 7577 - RNA, 19 nt, Artificial Sequence
  Synthetic Oligonucleotide
aguacuacggcuaaggcua

SEQ ID NO: 7578 - RNA, 19 nt, Artificial Sequence
  Synthetic Oligonucleotide
agcacuacagcuaaggcca

SEQ ID NO: 7579 - RNA, 19 nt, Artificial Sequence
  Synthetic Oligonucleotide
agcacuacagcuaaagcua

SEQ ID NO: 7580 - RNA, 19 nt, Artificial Sequence
  Synthetic Oligonucleotide
agcacuacagccaaggcua

SEQ ID NO: 7581 - RNA, 19 nt, Artificial Sequence
  Synthetic Oligonucleotide
agcacuacagcgaaggcua

SEQ ID NO: 7582 - RNA, 19 nt, Artificial Sequence
  Synthetic Oligonucleotide
agcacuaccgcuaaggcua

SEQ ID NO: 7583 - RNA, 19 nt, Artificial Sequence
  Synthetic Oligonucleotide
agcacaacagcuaaggcua

SEQ ID NO: 7584 - RNA, 19 nt, Artificial Sequence
  Synthetic Oligonucleotide
agcaccacagcuaaggcua

SEQ ID NO: 7585 - RNA, 19 nt, Artificial Sequence
  Synthetic Oligonucleotide
agcaauacagcuaaggcua

SEQ ID NO: 7586 - RNA, 19 nt, Artificial Sequence
  Synthetic Oligonucleotide
agcacuacggcuaaggcca

SEQ ID NO: 7587 - RNA, 19 nt, Artificial Sequence
  Synthetic Oligonucleotide
agcauuacagcuaaagcua

SEQ ID NO: 7588 - RNA, 19 nt, Artificial Sequence
  Synthetic Oligonucleotide
agcacuacagcuaaagcca

SEQ ID NO: 7589 - RNA, 19 nt, Artificial Sequence
  Synthetic Oligonucleotide
agcacuacagcuaaagcga

SEQ ID NO: 7590 - RNA, 19 nt, Artificial Sequence
  Synthetic Oligonucleotide
agcacuacagcuuaugcua

SEQ ID NO: 7591 - RNA, 19 nt, Artificial Sequence
  Synthetic Oligonucleotide
agcacaacagcuaaggcca

SEQ ID NO: 7592 - RNA, 19 nt, Artificial Sequence
  Synthetic Oligonucleotide
agcaccacggcuaaggcca

SEQ ID NO: 7593 - RNA, 19 nt, Artificial Sequence
  Synthetic Oligonucleotide
agcacaacagcuaaagcca

SEQ ID NO: 7594 - RNA, 19 nt, Artificial Sequence
  Synthetic Oligonucleotide
cacuacggcuaaggcuaug

SEQ ID NO: 7595 - RNA, 19 nt, Artificial Sequence
  Synthetic Oligonucleotide
uacuacagcuaaggcuaug

SEQ ID NO: 7596 - RNA, 19 nt, Artificial Sequence
  Synthetic Oligonucleotide
uacuacggcuaaggcuaug

SEQ ID NO: 7597 - RNA, 19 nt, Artificial Sequence
  Synthetic Oligonucleotide
cacuacagcuaaggccaug

SEQ ID NO: 7598 - RNA, 19 nt, Artificial Sequence
  Synthetic Oligonucleotide
cacuacagcuaaagcuaug

SEQ ID NO: 7599 - RNA, 19 nt, Artificial Sequence
  Synthetic Oligonucleotide
cacuacagccaaggcuaug

SEQ ID NO: 7600 - RNA, 19 nt, Artificial Sequence
  Synthetic Oligonucleotide
cacuacagcgaaggcuaug

SEQ ID NO: 7601 - RNA, 19 nt, Artificial Sequence
  Synthetic Oligonucleotide
cacuaccgcuaaggcuaug

SEQ ID NO: 7602 - RNA, 19 nt, Artificial Sequence
  Synthetic Oligonucleotide
cacaacagcuaaggcuaug

SEQ ID NO: 7603 - RNA, 19 nt, Artificial Sequence
  Synthetic Oligonucleotide
caccacagcuaaggcuaug

SEQ ID NO: 7604 - RNA, 19 nt, Artificial Sequence
  Synthetic Oligonucleotide
caauacagcuaaggcuaug

SEQ ID NO: 7605 - RNA, 19 nt, Artificial Sequence
  Synthetic Oligonucleotide
cacuacggcuaaggccaug

SEQ ID NO: 7606 - RNA, 19 nt, Artificial Sequence
  Synthetic Oligonucleotide
cauuacagcuaaagcuaug

SEQ ID NO: 7607 - RNA, 19 nt, Artificial Sequence
  Synthetic Oligonucleotide
cacuacagcuaaagccaug

SEQ ID NO: 7608 - RNA, 19 nt, Artificial Sequence
  Synthetic Oligonucleotide
cacuacagcuaaagcgaug

SEQ ID NO: 7609 - RNA, 19 nt, Artificial Sequence
  Synthetic Oligonucleotide
cacuacagcuuaugcuaug

SEQ ID NO: 7610 - RNA, 19 nt, Artificial Sequence
  Synthetic Oligonucleotide
cacaacagcuaaggccaug

SEQ ID NO: 7611 - RNA, 19 nt, Artificial Sequence
  Synthetic Oligonucleotide
caccacggcuaaggccaug

SEQ ID NO: 7612 - RNA, 19 nt, Artificial Sequence
  Synthetic Oligonucleotide
cacaacagcuaaagccaug

SEQ ID NO: 7613 - RNA, 19 nt, Artificial Sequence
  Synthetic Oligonucleotide
gcacuacggcuaaggcuau

SEQ ID NO: 7614 - RNA, 19 nt, Artificial Sequence
  Synthetic Oligonucleotide
guacuacagcuaaggcuau

SEQ ID NO: 7615 - RNA, 19 nt, Artificial Sequence
  Synthetic Oligonucleotide
guacuacggcuaaggcuau

SEQ ID NO: 7616 - RNA, 19 nt, Artificial Sequence
  Synthetic Oligonucleotide
gcacuacagcuaaggccau

SEQ ID NO: 7617 - RNA, 19 nt, Artificial Sequence
  Synthetic Oligonucleotide
gcacuacagcuaaagcuau

SEQ ID NO: 7618 - RNA, 19 nt, Artificial Sequence
  Synthetic Oligonucleotide
gcacuacagccaaggcuau

SEQ ID NO: 7619 - RNA, 19 nt, Artificial Sequence
  Synthetic Oligonucleotide
gcacuacagcgaaggcuau

SEQ ID NO: 7620 - RNA, 19 nt, Artificial Sequence
  Synthetic Oligonucleotide
gcacuaccgcuaaggcuau

SEQ ID NO: 7621 - RNA, 19 nt, Artificial Sequence
  Synthetic Oligonucleotide
gcacaacagcuaaggcuau

SEQ ID NO: 7622 - RNA, 19 nt, Artificial Sequence
  Synthetic Oligonucleotide
gcaccacagcuaaggcuau

SEQ ID NO: 7623 - RNA, 19 nt, Artificial Sequence
  Synthetic Oligonucleotide
gcaauacagcuaaggcuau

SEQ ID NO: 7624 - RNA, 19 nt, Artificial Sequence
  Synthetic Oligonucleotide
gcacuacggcuaaggccau

SEQ ID NO: 7625 - RNA, 19 nt, Artificial Sequence
  Synthetic Oligonucleotide
gcauuacagcuaaagcuau

SEQ ID NO: 7626 - RNA, 19 nt, Artificial Sequence
  Synthetic Oligonucleotide
gcacuacagcuaaagccau

SEQ ID NO: 7627 - RNA, 19 nt, Artificial Sequence
  Synthetic Oligonucleotide
gcacuacagcuaaagcgau

SEQ ID NO: 7628 - RNA, 19 nt, Artificial Sequence
  Synthetic Oligonucleotide
gcacuacagcuuaugcuau

SEQ ID NO: 7629 - RNA, 19 nt, Artificial Sequence
  Synthetic Oligonucleotide
gcacaacagcuaaggccau

SEQ ID NO: 7630 - RNA, 19 nt, Artificial Sequence
  Synthetic Oligonucleotide
gcaccacggcuaaggccau

SEQ ID NO: 7631 - RNA, 19 nt, Artificial Sequence
  Synthetic Oligonucleotide
gcacaacagcuaaagccau

SEQ ID NO: 7632 - RNA, 19 nt, Artificial Sequence
  Synthetic Oligonucleotide
gcguagacgcuuuguccag

SEQ ID NO: 7633 - RNA, 19 nt, Artificial Sequence
  Synthetic Oligonucleotide
gcguagacgcuuuguucaa

SEQ ID NO: 7634 - RNA, 19 nt, Artificial Sequence
  Synthetic Oligonucleotide
gcguagacguuuuguccaa

SEQ ID NO: 7635 - RNA, 19 nt, Artificial Sequence
  Synthetic Oligonucleotide
gcguagacgcuuuguucag

SEQ ID NO: 7636 - RNA, 19 nt, Artificial Sequence
  Synthetic Oligonucleotide
gcguagacguuuuguccag

SEQ ID NO: 7637 - RNA, 19 nt, Artificial Sequence
  Synthetic Oligonucleotide
gcguagacgcuucguccaa

SEQ ID NO: 7638 - RNA, 19 nt, Artificial Sequence
  Synthetic Oligonucleotide
gcguagacgauuuguccaa

SEQ ID NO: 7639 - RNA, 19 nt, Artificial Sequence
  Synthetic Oligonucleotide
gcguagacgguuuguccaa

SEQ ID NO: 7640 - RNA, 19 nt, Artificial Sequence
  Synthetic Oligonucleotide
gcguacacgcuuuguccaa

SEQ ID NO: 7641 - RNA, 19 nt, Artificial Sequence
  Synthetic Oligonucleotide
gcguauacgcuuuguccaa

SEQ ID NO: 7642 - RNA, 19 nt, Artificial Sequence
  Synthetic Oligonucleotide
acguagacgcuuuguccaa

SEQ ID NO: 7643 - RNA, 19 nt, Artificial Sequence
  Synthetic Oligonucleotide
gcguaaacgcuuuguccag

SEQ ID NO: 7644 - RNA, 19 nt, Artificial Sequence
  Synthetic Oligonucleotide
acguagacgcuuuguucaa

SEQ ID NO: 7645 - RNA, 19 nt, Artificial Sequence
  Synthetic Oligonucleotide
gcguauacgauuuguccaa

SEQ ID NO: 7646 - RNA, 19 nt, Artificial Sequence
  Synthetic Oligonucleotide
acguauacgcuuuguccaa

SEQ ID NO: 7647 - RNA, 19 nt, Artificial Sequence
  Synthetic Oligonucleotide
ucguacacucuuuguccaa

SEQ ID NO: 7648 - RNA, 19 nt, Artificial Sequence
  Synthetic Oligonucleotide
ccagcacuacggcuaaggc

SEQ ID NO: 7649 - RNA, 19 nt, Artificial Sequence
  Synthetic Oligonucleotide
ccaguacuacagcuaaggc

SEQ ID NO: 7650 - RNA, 19 nt, Artificial Sequence
  Synthetic Oligonucleotide
cuagcacuacagcuaaggc

SEQ ID NO: 7651 - RNA, 19 nt, Artificial Sequence
  Synthetic Oligonucleotide
ccaguacuacggcuaaggc

SEQ ID NO: 7652 - RNA, 19 nt, Artificial Sequence
  Synthetic Oligonucleotide
ccagcacuacagcuaaagc

SEQ ID NO: 7653 - RNA, 19 nt, Artificial Sequence
  Synthetic Oligonucleotide
ccagcacuacagccaaggc

SEQ ID NO: 7654 - RNA, 19 nt, Artificial Sequence
  Synthetic Oligonucleotide
ccagcacuacagcgaaggc

SEQ ID NO: 7655 - RNA, 19 nt, Artificial Sequence
  Synthetic Oligonucleotide
ccagcacuaccgcuaaggc

SEQ ID NO: 7656 - RNA, 19 nt, Artificial Sequence
  Synthetic Oligonucleotide
ccagcacaacagcuaaggc

SEQ ID NO: 7657 - RNA, 19 nt, Artificial Sequence
  Synthetic Oligonucleotide
ccagcaccacagcuaaggc

SEQ ID NO: 7658 - RNA, 19 nt, Artificial Sequence
  Synthetic Oligonucleotide
ccagcaauacagcuaaggc

SEQ ID NO: 7659 - RNA, 19 nt, Artificial Sequence
  Synthetic Oligonucleotide
caagcacuacagcuaaggc

SEQ ID NO: 7660 - RNA, 19 nt, Artificial Sequence
  Synthetic Oligonucleotide
ccagcaccacggcuaaggc

SEQ ID NO: 7661 - RNA, 19 nt, Artificial Sequence
  Synthetic Oligonucleotide
ccagcauuacagcuaaagc

SEQ ID NO: 7662 - RNA, 19 nt, Artificial Sequence
  Synthetic Oligonucleotide
cuagcaccacagcuaaggc

SEQ ID NO: 7663 - RNA, 19 nt, Artificial Sequence
  Synthetic Oligonucleotide
ccagcacuacagcuuaugc

SEQ ID NO: 7664 - RNA, 19 nt, Artificial Sequence
  Synthetic Oligonucleotide
ccagcacaacagcuaaagc

SEQ ID NO: 7665 - RNA, 19 nt, Artificial Sequence
  Synthetic Oligonucleotide
uacggcuaaggcuauggag

SEQ ID NO: 7666 - RNA, 19 nt, Artificial Sequence
  Synthetic Oligonucleotide
uacagcuaaggcuauggaa

SEQ ID NO: 7667 - RNA, 19 nt, Artificial Sequence
  Synthetic Oligonucleotide
uacagcuaaggccauggag

SEQ ID NO: 7668 - RNA, 19 nt, Artificial Sequence
  Synthetic Oligonucleotide
uacagcuaaagcuauggag

SEQ ID NO: 7669 - RNA, 19 nt, Artificial Sequence
  Synthetic Oligonucleotide
uacagccaaggcuauggag

SEQ ID NO: 7670 - RNA, 19 nt, Artificial Sequence
  Synthetic Oligonucleotide
uacagcgaaggcuauggag

SEQ ID NO: 7671 - RNA, 19 nt, Artificial Sequence
  Synthetic Oligonucleotide
uaccgcuaaggcuauggag

SEQ ID NO: 7672 - RNA, 19 nt, Artificial Sequence
  Synthetic Oligonucleotide
aacagcuaaggcuauggag

SEQ ID NO: 7673 - RNA, 19 nt, Artificial Sequence
  Synthetic Oligonucleotide
cacagcuaaggcuauggag

SEQ ID NO: 7674 - RNA, 19 nt, Artificial Sequence
  Synthetic Oligonucleotide
uacggcuaaggccauggag

SEQ ID NO: 7675 - RNA, 19 nt, Artificial Sequence
  Synthetic Oligonucleotide
uacagcuaaggccauggaa

SEQ ID NO: 7676 - RNA, 19 nt, Artificial Sequence
  Synthetic Oligonucleotide
uacagcuaaagccauggag

SEQ ID NO: 7677 - RNA, 19 nt, Artificial Sequence
  Synthetic Oligonucleotide
uacagcuaaagcgauggag

SEQ ID NO: 7678 - RNA, 19 nt, Artificial Sequence
  Synthetic Oligonucleotide
uacagcuuaugcuauggag

SEQ ID NO: 7679 - RNA, 19 nt, Artificial Sequence
  Synthetic Oligonucleotide
uacagccaaggcuauggaa

SEQ ID NO: 7680 - RNA, 19 nt, Artificial Sequence
  Synthetic Oligonucleotide
cacagcuaaggcuauggaa

SEQ ID NO: 7681 - RNA, 19 nt, Artificial Sequence
  Synthetic Oligonucleotide
cacggcuaaggccauggag

SEQ ID NO: 7682 - RNA, 19 nt, Artificial Sequence
  Synthetic Oligonucleotide
gccagcacuacggcuaagg

SEQ ID NO: 7683 - RNA, 19 nt, Artificial Sequence
  Synthetic Oligonucleotide
gccaguacuacagcuaagg

SEQ ID NO: 7684 - RNA, 19 nt, Artificial Sequence
  Synthetic Oligonucleotide
gcuagcacuacagcuaagg

SEQ ID NO: 7685 - RNA, 19 nt, Artificial Sequence
  Synthetic Oligonucleotide
gccaguacuacggcuaagg

SEQ ID NO: 7686 - RNA, 19 nt, Artificial Sequence
  Synthetic Oligonucleotide
gccagcacuacagcuaaag

SEQ ID NO: 7687 - RNA, 19 nt, Artificial Sequence
  Synthetic Oligonucleotide
gccagcacuacagccaagg

SEQ ID NO: 7688 - RNA, 19 nt, Artificial Sequence
  Synthetic Oligonucleotide
gccagcacuacagcgaagg

SEQ ID NO: 7689 - RNA, 19 nt, Artificial Sequence
  Synthetic Oligonucleotide
gccagcacuaccgcuaagg

SEQ ID NO: 7690 - RNA, 19 nt, Artificial Sequence
  Synthetic Oligonucleotide
gccagcacaacagcuaagg

SEQ ID NO: 7691 - RNA, 19 nt, Artificial Sequence
  Synthetic Oligonucleotide
gccagcaccacagcuaagg

SEQ ID NO: 7692 - RNA, 19 nt, Artificial Sequence
  Synthetic Oligonucleotide
gccagcaauacagcuaagg

SEQ ID NO: 7693 - RNA, 19 nt, Artificial Sequence
  Synthetic Oligonucleotide
gcaagcacuacagcuaagg

SEQ ID NO: 7694 - RNA, 19 nt, Artificial Sequence
  Synthetic Oligonucleotide
gccagcaccacggcuaagg

SEQ ID NO: 7695 - RNA, 19 nt, Artificial Sequence
  Synthetic Oligonucleotide
gccagcauuacagcuaaag

SEQ ID NO: 7696 - RNA, 19 nt, Artificial Sequence
  Synthetic Oligonucleotide
gcuagcaccacagcuaagg

SEQ ID NO: 7697 - RNA, 19 nt, Artificial Sequence
  Synthetic Oligonucleotide
gccagcacuacagcuuaug

SEQ ID NO: 7698 - RNA, 19 nt, Artificial Sequence
  Synthetic Oligonucleotide
gccagcacaacagcuaaag

SEQ ID NO: 7699 - RNA, 19 nt, Artificial Sequence
  Synthetic Oligonucleotide
cagcacuacggcuaaggcu

SEQ ID NO: 7700 - RNA, 19 nt, Artificial Sequence
  Synthetic Oligonucleotide
caguacuacagcuaaggcu

SEQ ID NO: 7701 - RNA, 19 nt, Artificial Sequence
  Synthetic Oligonucleotide
uagcacuacagcuaaggcu

SEQ ID NO: 7702 - RNA, 19 nt, Artificial Sequence
  Synthetic Oligonucleotide
caguacuacggcuaaggcu

SEQ ID NO: 7703 - RNA, 19 nt, Artificial Sequence
  Synthetic Oligonucleotide
cagcacuacagcuaaggcc

SEQ ID NO: 7704 - RNA, 19 nt, Artificial Sequence
  Synthetic Oligonucleotide
cagcacuacagcuaaagcu

SEQ ID NO: 7705 - RNA, 19 nt, Artificial Sequence
  Synthetic Oligonucleotide
cagcacuacagccaaggcu

SEQ ID NO: 7706 - RNA, 19 nt, Artificial Sequence
  Synthetic Oligonucleotide
cagcacuacagcgaaggcu

SEQ ID NO: 7707 - RNA, 19 nt, Artificial Sequence
  Synthetic Oligonucleotide
cagcacuaccgcuaaggcu

SEQ ID NO: 7708 - RNA, 19 nt, Artificial Sequence
  Synthetic Oligonucleotide
cagcacaacagcuaaggcu

SEQ ID NO: 7709 - RNA, 19 nt, Artificial Sequence
  Synthetic Oligonucleotide
cagcaccacagcuaaggcu

SEQ ID NO: 7710 - RNA, 19 nt, Artificial Sequence
  Synthetic Oligonucleotide
cagcaauacagcuaaggcu

SEQ ID NO: 7711 - RNA, 19 nt, Artificial Sequence
  Synthetic Oligonucleotide
aagcacuacagcuaaggcu

SEQ ID NO: 7712 - RNA, 19 nt, Artificial Sequence
  Synthetic Oligonucleotide
cagcacuacggcuaaggcc

SEQ ID NO: 7713 - RNA, 19 nt, Artificial Sequence
  Synthetic Oligonucleotide
cagcauuacagcuaaagcu

SEQ ID NO: 7714 - RNA, 19 nt, Artificial Sequence
  Synthetic Oligonucleotide
uagcacuacagcuaaggcc

SEQ ID NO: 7715 - RNA, 19 nt, Artificial Sequence
  Synthetic Oligonucleotide
uagcaccacagcuaaggcu

SEQ ID NO: 7716 - RNA, 19 nt, Artificial Sequence
  Synthetic Oligonucleotide
cagcacuacagcuaaagcc

SEQ ID NO: 7717 - RNA, 19 nt, Artificial Sequence
  Synthetic Oligonucleotide
cagcacuacagcuaaagcg

SEQ ID NO: 7718 - RNA, 19 nt, Artificial Sequence
  Synthetic Oligonucleotide
cagcacuacagcuuaugcu

SEQ ID NO: 7719 - RNA, 19 nt, Artificial Sequence
  Synthetic Oligonucleotide
cagcacaacagcuaaggcc

SEQ ID NO: 7720 - RNA, 19 nt, Artificial Sequence
  Synthetic Oligonucleotide
cagcaccacggcuaaggcc

SEQ ID NO: 7721 - RNA, 19 nt, Artificial Sequence
  Synthetic Oligonucleotide
cagcacaacagcuaaagcc

SEQ ID NO: 7722 - RNA, 19 nt, Artificial Sequence
  Synthetic Oligonucleotide
uggcuaaagacaagaccga

SEQ ID NO: 7723 - RNA, 19 nt, Artificial Sequence
  Synthetic Oligonucleotide
uggcuaaagacaagaucaa

SEQ ID NO: 7724 - RNA, 19 nt, Artificial Sequence
  Synthetic Oligonucleotide
uggcuaaagacaaggccaa

SEQ ID NO: 7725 - RNA, 19 nt, Artificial Sequence
  Synthetic Oligonucleotide
uggcugaagacaagaccaa

SEQ ID NO: 7726 - RNA, 19 nt, Artificial Sequence
  Synthetic Oligonucleotide
ugguuaaagacaagaccaa

SEQ ID NO: 7727 - RNA, 19 nt, Artificial Sequence
  Synthetic Oligonucleotide
ugguuaaagacaagaccga

SEQ ID NO: 7728 - RNA, 19 nt, Artificial Sequence
  Synthetic Oligonucleotide
uggcuaaagacaagaccca

SEQ ID NO: 7729 - RNA, 19 nt, Artificial Sequence
  Synthetic Oligonucleotide
uggcuaaagacaagaccua

SEQ ID NO: 7730 - RNA, 19 nt, Artificial Sequence
  Synthetic Oligonucleotide
uggcuaaagacaaaaccaa

SEQ ID NO: 7731 - RNA, 19 nt, Artificial Sequence
  Synthetic Oligonucleotide
uggcuaaagccaagaccaa

SEQ ID NO: 7732 - RNA, 19 nt, Artificial Sequence
  Synthetic Oligonucleotide
uggcuaaagacuagaccua

SEQ ID NO: 7733 - RNA, 19 nt, Artificial Sequence
  Synthetic Oligonucleotide
ggcuaaagacaagaccgau

SEQ ID NO: 7734 - RNA, 19 nt, Artificial Sequence
  Synthetic Oligonucleotide
ggcuaaagacaagaucaau

SEQ ID NO: 7735 - RNA, 19 nt, Artificial Sequence
  Synthetic Oligonucleotide
ggcuaaagacaaggccaau

SEQ ID NO: 7736 - RNA, 19 nt, Artificial Sequence
  Synthetic Oligonucleotide
ggcugaagacaagaccaau

SEQ ID NO: 7737 - RNA, 19 nt, Artificial Sequence
  Synthetic Oligonucleotide
gguuaaagacaagaccaau

SEQ ID NO: 7738 - RNA, 19 nt, Artificial Sequence
  Synthetic Oligonucleotide
gguuaaagacaagaccgau

SEQ ID NO: 7739 - RNA, 19 nt, Artificial Sequence
  Synthetic Oligonucleotide
ggcuaaagacaagacccau

SEQ ID NO: 7740 - RNA, 19 nt, Artificial Sequence
  Synthetic Oligonucleotide
ggcuaaagacaagaccuau

SEQ ID NO: 7741 - RNA, 19 nt, Artificial Sequence
  Synthetic Oligonucleotide
ggcuaaagacaaaaccaau

SEQ ID NO: 7742 - RNA, 19 nt, Artificial Sequence
  Synthetic Oligonucleotide
ggcuaaagccaagaccaau

SEQ ID NO: 7743 - RNA, 19 nt, Artificial Sequence
  Synthetic Oligonucleotide
ggcuaaagacuagaccuau

SEQ ID NO: 7744 - RNA, 19 nt, Artificial Sequence
  Synthetic Oligonucleotide
gcuauggagcagauggcug

SEQ ID NO: 7745 - RNA, 19 nt, Artificial Sequence
  Synthetic Oligonucleotide
gcuauggagcaaauggcag

SEQ ID NO: 7746 - RNA, 19 nt, Artificial Sequence
  Synthetic Oligonucleotide
gcuauggagcacauggcug

SEQ ID NO: 7747 - RNA, 19 nt, Artificial Sequence
  Synthetic Oligonucleotide
gcuauggaacaaauggcug

SEQ ID NO: 7748 - RNA, 19 nt, Artificial Sequence
  Synthetic Oligonucleotide
gccauggagcaaauggcug

SEQ ID NO: 7749 - RNA, 19 nt, Artificial Sequence
  Synthetic Oligonucleotide
gcgauggagcaaauggcug

SEQ ID NO: 7750 - RNA, 19 nt, Artificial Sequence
  Synthetic Oligonucleotide
gcuauggagcagauggcag

SEQ ID NO: 7751 - RNA, 19 nt, Artificial Sequence
  Synthetic Oligonucleotide
gcuauggagcagauggcgg

SEQ ID NO: 7752 - RNA, 19 nt, Artificial Sequence
  Synthetic Oligonucleotide
gcuauggaacagauggcug

SEQ ID NO: 7753 - RNA, 19 nt, Artificial Sequence
  Synthetic Oligonucleotide
gccauggagcagauggcug

SEQ ID NO: 7754 - RNA, 19 nt, Artificial Sequence
  Synthetic Oligonucleotide
gcuauggaacagaugguug

SEQ ID NO: 7755 - RNA, 19 nt, Artificial Sequence
  Synthetic Oligonucleotide
gccauggagcaaauggcag

SEQ ID NO: 7756 - RNA, 19 nt, Artificial Sequence
  Synthetic Oligonucleotide
gccauggaacaaauggcug

SEQ ID NO: 7757 - RNA, 19 nt, Artificial Sequence
  Synthetic Oligonucleotide
gccauggagcagauggcag

SEQ ID NO: 7758 - RNA, 19 nt, Artificial Sequence
  Synthetic Oligonucleotide
cuauggagcagauggcugg

SEQ ID NO: 7759 - RNA, 19 nt, Artificial Sequence
  Synthetic Oligonucleotide
cuauggagcaaauggcagg

SEQ ID NO: 7760 - RNA, 19 nt, Artificial Sequence
  Synthetic Oligonucleotide
cuauggagcacauggcugg

SEQ ID NO: 7761 - RNA, 19 nt, Artificial Sequence
  Synthetic Oligonucleotide
cuauggaacaaauggcugg

SEQ ID NO: 7762 - RNA, 19 nt, Artificial Sequence
  Synthetic Oligonucleotide
ccauggagcaaauggcugg

SEQ ID NO: 7763 - RNA, 19 nt, Artificial Sequence
  Synthetic Oligonucleotide
cgauggagcaaauggcugg

SEQ ID NO: 7764 - RNA, 19 nt, Artificial Sequence
  Synthetic Oligonucleotide
cuauggagcagauggcagg

SEQ ID NO: 7765 - RNA, 19 nt, Artificial Sequence
  Synthetic Oligonucleotide
cuauggagcagauggcggg

SEQ ID NO: 7766 - RNA, 19 nt, Artificial Sequence
  Synthetic Oligonucleotide
cuauggaacagauggcugg

SEQ ID NO: 7767 - RNA, 19 nt, Artificial Sequence
  Synthetic Oligonucleotide
ccauggagcagauggcugg

SEQ ID NO: 7768 - RNA, 19 nt, Artificial Sequence
  Synthetic Oligonucleotide
cuauggaacagaugguugg

SEQ ID NO: 7769 - RNA, 19 nt, Artificial Sequence
  Synthetic Oligonucleotide
ccauggagcaaauggcagg

SEQ ID NO: 7770 - RNA, 19 nt, Artificial Sequence
  Synthetic Oligonucleotide
ccauggaacaaauggcugg

SEQ ID NO: 7771 - RNA, 19 nt, Artificial Sequence
  Synthetic Oligonucleotide
ccauggagcagauggcagg

SEQ ID NO: 7772 - RNA, 19 nt, Artificial Sequence
  Synthetic Oligonucleotide
cuggugcacuugcuaguug

SEQ ID NO: 7773 - RNA, 19 nt, Artificial Sequence
  Synthetic Oligonucleotide
cuggugcgcuugccaguug

SEQ ID NO: 7774 - RNA, 19 nt, Artificial Sequence
  Synthetic Oligonucleotide
cuggugcacuugccagcug

SEQ ID NO: 7775 - RNA, 19 nt, Artificial Sequence
  Synthetic Oligonucleotide
cuggugcacuagccaguug

SEQ ID NO: 7776 - RNA, 19 nt, Artificial Sequence
  Synthetic Oligonucleotide
cuggugcacucgccaguug

SEQ ID NO: 7777 - RNA, 19 nt, Artificial Sequence
  Synthetic Oligonucleotide
cuggagcacuugccaguug

SEQ ID NO: 7778 - RNA, 19 nt, Artificial Sequence
  Synthetic Oligonucleotide
cuggcgcacuugccaguug

SEQ ID NO: 7779 - RNA, 19 nt, Artificial Sequence
  Synthetic Oligonucleotide
ccggugcacuugccaguug

SEQ ID NO: 7780 - RNA, 19 nt, Artificial Sequence
  Synthetic Oligonucleotide
cuggugcgcuugccagcug

SEQ ID NO: 7781 - RNA, 19 nt, Artificial Sequence
  Synthetic Oligonucleotide
ccggugcacucgccaguug

SEQ ID NO: 7782 - RNA, 19 nt, Artificial Sequence
  Synthetic Oligonucleotide
ccggggcacuugccaguug

SEQ ID NO: 7783 - RNA, 19 nt, Artificial Sequence
  Synthetic Oligonucleotide
gagucuaugagggaagagu

SEQ ID NO: 7784 - RNA, 19 nt, Artificial Sequence
  Synthetic Oligonucleotide
gagucuaugagggaggaau

SEQ ID NO: 7785 - RNA, 19 nt, Artificial Sequence
  Synthetic Oligonucleotide
gagucuaugggggaagaau

SEQ ID NO: 7786 - RNA, 19 nt, Artificial Sequence
  Synthetic Oligonucleotide
gaguuuaugagggaagaau

SEQ ID NO: 7787 - RNA, 19 nt, Artificial Sequence
  Synthetic Oligonucleotide
gagucuaugagggaggagu

SEQ ID NO: 7788 - RNA, 19 nt, Artificial Sequence
  Synthetic Oligonucleotide
gagucuaugagggaacaau

SEQ ID NO: 7789 - RNA, 19 nt, Artificial Sequence
  Synthetic Oligonucleotide
gagucuuugagggaagaau

SEQ ID NO: 7790 - RNA, 19 nt, Artificial Sequence
  Synthetic Oligonucleotide
gaguccaugagggaagaau

SEQ ID NO: 7791 - RNA, 19 nt, Artificial Sequence
  Synthetic Oligonucleotide
aagucuaugagggaagaau

SEQ ID NO: 7792 - RNA, 19 nt, Artificial Sequence
  Synthetic Oligonucleotide
wagucuaugagggaagaau

SEQ ID NO: 7793 - RNA, 19 nt, Artificial Sequence
  Synthetic Oligonucleotide
gaguccaugagggaagagu

SEQ ID NO: 7794 - RNA, 19 nt, Artificial Sequence
  Synthetic Oligonucleotide
gagucuacuagggaagaau

SEQ ID NO: 7795 - RNA, 19 nt, Artificial Sequence
  Synthetic Oligonucleotide
ucugcuggugcacuugcua

SEQ ID NO: 7796 - RNA, 19 nt, Artificial Sequence
  Synthetic Oligonucleotide
ucugcuggugcgcuugcca

SEQ ID NO: 7797 - RNA, 19 nt, Artificial Sequence
  Synthetic Oligonucleotide
ucugcuggugcacuagcca

SEQ ID NO: 7798 - RNA, 19 nt, Artificial Sequence
  Synthetic Oligonucleotide
ucugcuggugcacucgcca

SEQ ID NO: 7799 - RNA, 19 nt, Artificial Sequence
  Synthetic Oligonucleotide
ucugcuggagcacuugcca

SEQ ID NO: 7800 - RNA, 19 nt, Artificial Sequence
  Synthetic Oligonucleotide
ucugcuggcgcacuugcca

SEQ ID NO: 7801 - RNA, 19 nt, Artificial Sequence
  Synthetic Oligonucleotide
ucugccggugcacuugcca

SEQ ID NO: 7802 - RNA, 19 nt, Artificial Sequence
  Synthetic Oligonucleotide
uccgcuggugcacuugcca

SEQ ID NO: 7803 - RNA, 19 nt, Artificial Sequence
  Synthetic Oligonucleotide
ucggcuggugcacuugcca

SEQ ID NO: 7804 - RNA, 19 nt, Artificial Sequence
  Synthetic Oligonucleotide
ucaacuggugcacuugcca

SEQ ID NO: 7805 - RNA, 19 nt, Artificial Sequence
  Synthetic Oligonucleotide
ucaacuggugcgcuugcca

SEQ ID NO: 7806 - RNA, 19 nt, Artificial Sequence
  Synthetic Oligonucleotide
ucaaccggugcacuugcca

SEQ ID NO: 7807 - RNA, 19 nt, Artificial Sequence
  Synthetic Oligonucleotide
ucgaccggugcacuugcca

SEQ ID NO: 7808 - RNA, 19 nt, Artificial Sequence
  Synthetic Oligonucleotide
gcuggugcacuugcuaguu

SEQ ID NO: 7809 - RNA, 19 nt, Artificial Sequence
  Synthetic Oligonucleotide
gcuggugcgcuugccaguu

SEQ ID NO: 7810 - RNA, 19 nt, Artificial Sequence
  Synthetic Oligonucleotide
gcuggugcacuugccagcu

SEQ ID NO: 7811 - RNA, 19 nt, Artificial Sequence
  Synthetic Oligonucleotide
gcuggugcacuagccaguu

SEQ ID NO: 7812 - RNA, 19 nt, Artificial Sequence
  Synthetic Oligonucleotide
gcuggugcacucgccaguu

SEQ ID NO: 7813 - RNA, 19 nt, Artificial Sequence
  Synthetic Oligonucleotide
gcuggagcacuugccaguu

SEQ ID NO: 7814 - RNA, 19 nt, Artificial Sequence
  Synthetic Oligonucleotide
gcuggcgcacuugccaguu

SEQ ID NO: 7815 - RNA, 19 nt, Artificial Sequence
  Synthetic Oligonucleotide
gccggugcacuugccaguu

SEQ ID NO: 7816 - RNA, 19 nt, Artificial Sequence
  Synthetic Oligonucleotide
acuggugcacuugccaguu

SEQ ID NO: 7817 - RNA, 19 nt, Artificial Sequence
  Synthetic Oligonucleotide
gcuggugcgcuugccagcu

SEQ ID NO: 7818 - RNA, 19 nt, Artificial Sequence
  Synthetic Oligonucleotide
acuggugcgcuugccaguu

SEQ ID NO: 7819 - RNA, 19 nt, Artificial Sequence
  Synthetic Oligonucleotide
acuggugcacuugccagcu

SEQ ID NO: 7820 - RNA, 19 nt, Artificial Sequence
  Synthetic Oligonucleotide
accggugcacuugccaguu

SEQ ID NO: 7821 - RNA, 19 nt, Artificial Sequence
  Synthetic Oligonucleotide
accggugcacucgccaguu

SEQ ID NO: 7822 - RNA, 19 nt, Artificial Sequence
  Synthetic Oligonucleotide
accggggcacuugccaguu

SEQ ID NO: 7823 - RNA, 19 nt, Artificial Sequence
  Synthetic Oligonucleotide
cugcuggugcacuugcuag

SEQ ID NO: 7824 - RNA, 19 nt, Artificial Sequence
  Synthetic Oligonucleotide
cugcuggugcgcuugccag

SEQ ID NO: 7825 - RNA, 19 nt, Artificial Sequence
  Synthetic Oligonucleotide
cugcuggugcacuagccag

SEQ ID NO: 7826 - RNA, 19 nt, Artificial Sequence
  Synthetic Oligonucleotide
cugcuggugcacucgccag

SEQ ID NO: 7827 - RNA, 19 nt, Artificial Sequence
  Synthetic Oligonucleotide
cugcuggagcacuugccag

SEQ ID NO: 7828 - RNA, 19 nt, Artificial Sequence
  Synthetic Oligonucleotide
cugcuggcgcacuugccag

SEQ ID NO: 7829 - RNA, 19 nt, Artificial Sequence
  Synthetic Oligonucleotide
cugccggugcacuugccag

SEQ ID NO: 7830 - RNA, 19 nt, Artificial Sequence
  Synthetic Oligonucleotide
ccgcuggugcacuugccag

SEQ ID NO: 7831 - RNA, 19 nt, Artificial Sequence
  Synthetic Oligonucleotide
cggcuggugcacuugccag

SEQ ID NO: 7832 - RNA, 19 nt, Artificial Sequence
  Synthetic Oligonucleotide
caacuggugcacuugccag

SEQ ID NO: 7833 - RNA, 19 nt, Artificial Sequence
  Synthetic Oligonucleotide
caacuggugcgcuugccag

SEQ ID NO: 7834 - RNA, 19 nt, Artificial Sequence
  Synthetic Oligonucleotide
caaccggugcacuugccag

SEQ ID NO: 7835 - RNA, 19 nt, Artificial Sequence
  Synthetic Oligonucleotide
cgaccggugcacuugccag

SEQ ID NO: 7836 - RNA, 19 nt, Artificial Sequence
  Synthetic Oligonucleotide
ugcuggugcacuugcuagu

SEQ ID NO: 7837 - RNA, 19 nt, Artificial Sequence
  Synthetic Oligonucleotide
ugcuggugcgcuugccagu

SEQ ID NO: 7838 - RNA, 19 nt, Artificial Sequence
  Synthetic Oligonucleotide
ugcuggugcacuugccagc

SEQ ID NO: 7839 - RNA, 19 nt, Artificial Sequence
  Synthetic Oligonucleotide
ugcuggugcacuagccagu

SEQ ID NO: 7840 - RNA, 19 nt, Artificial Sequence
  Synthetic Oligonucleotide
ugcuggugcacucgccagu

SEQ ID NO: 7841 - RNA, 19 nt, Artificial Sequence
  Synthetic Oligonucleotide
ugcuggagcacuugccagu

SEQ ID NO: 7842 - RNA, 19 nt, Artificial Sequence
  Synthetic Oligonucleotide
ugcuggcgcacuugccagu

SEQ ID NO: 7843 - RNA, 19 nt, Artificial Sequence
  Synthetic Oligonucleotide
ugccggugcacuugccagu

SEQ ID NO: 7844 - RNA, 19 nt, Artificial Sequence
  Synthetic Oligonucleotide
cgcuggugcacuugccagu

SEQ ID NO: 7845 - RNA, 19 nt, Artificial Sequence
  Synthetic Oligonucleotide
ggcuggugcacuugccagu

SEQ ID NO: 7846 - RNA, 19 nt, Artificial Sequence
  Synthetic Oligonucleotide
ugcuggugcgcuugccagc

SEQ ID NO: 7847 - RNA, 19 nt, Artificial Sequence
  Synthetic Oligonucleotide
aacuggugcacuugccagu

SEQ ID NO: 7848 - RNA, 19 nt, Artificial Sequence
  Synthetic Oligonucleotide
aacuggugcgcuugccagu

SEQ ID NO: 7849 - RNA, 19 nt, Artificial Sequence
  Synthetic Oligonucleotide
aacuggugcacuugccagc

SEQ ID NO: 7850 - RNA, 19 nt, Artificial Sequence
  Synthetic Oligonucleotide
aaccggugcacuugccagu

SEQ ID NO: 7851 - RNA, 19 nt, Artificial Sequence
  Synthetic Oligonucleotide
gaccggugcacuugccagu

SEQ ID NO: 7852 - RNA, 19 nt, Artificial Sequence
  Synthetic Oligonucleotide
cuucuacggaaggagugcc

SEQ ID NO: 7853 - RNA, 19 nt, Artificial Sequence
  Synthetic Oligonucleotide
cuucuacggaagggguacc

SEQ ID NO: 7854 - RNA, 19 nt, Artificial Sequence
  Synthetic Oligonucleotide
cuucuacggagggaguacc

SEQ ID NO: 7855 - RNA, 19 nt, Artificial Sequence
  Synthetic Oligonucleotide
cuucuacgggaggaguacc

SEQ ID NO: 7856 - RNA, 19 nt, Artificial Sequence
  Synthetic Oligonucleotide
cuucuauggaaggaguacc

SEQ ID NO: 7857 - RNA, 19 nt, Artificial Sequence
  Synthetic Oligonucleotide
cuuuuacggaaggaguacc

SEQ ID NO: 7858 - RNA, 19 nt, Artificial Sequence
  Synthetic Oligonucleotide
cuucuacggaaggggugcc

SEQ ID NO: 7859 - RNA, 19 nt, Artificial Sequence
  Synthetic Oligonucleotide
cuucuacggaaggaguucc

SEQ ID NO: 7860 - RNA, 19 nt, Artificial Sequence
  Synthetic Oligonucleotide
cuucuacggaaggaauacc

SEQ ID NO: 7861 - RNA, 19 nt, Artificial Sequence
  Synthetic Oligonucleotide
cuucuacggauggaguacc

SEQ ID NO: 7862 - RNA, 19 nt, Artificial Sequence
  Synthetic Oligonucleotide
cuucuacagaaggaguacc

SEQ ID NO: 7863 - RNA, 19 nt, Artificial Sequence
  Synthetic Oligonucleotide
cuuccacggaaggaguacc

SEQ ID NO: 7864 - RNA, 19 nt, Artificial Sequence
  Synthetic Oligonucleotide
cuuguacggaaggaguacc

SEQ ID NO: 7865 - RNA, 19 nt, Artificial Sequence
  Synthetic Oligonucleotide
cugcuacggaaggaguacc

SEQ ID NO: 7866 - RNA, 19 nt, Artificial Sequence
  Synthetic Oligonucleotide
auucuacggaaggaguacc

SEQ ID NO: 7867 - RNA, 19 nt, Artificial Sequence
  Synthetic Oligonucleotide
cuucuacggcagggguacc

SEQ ID NO: 7868 - RNA, 19 nt, Artificial Sequence
  Synthetic Oligonucleotide
cuucuauggcagggguacc

SEQ ID NO: 7869 - RNA, 19 nt, Artificial Sequence
  Synthetic Oligonucleotide
cuccuacggaaggagugcu

SEQ ID NO: 7870 - RNA, 19 nt, Artificial Sequence
  Synthetic Oligonucleotide
cuucuacagauggaguacc

SEQ ID NO: 7871 - RNA, 19 nt, Artificial Sequence
  Synthetic Oligonucleotide
cucauacggaaggaguacc

SEQ ID NO: 7872 - RNA, 19 nt, Artificial Sequence
  Synthetic Oligonucleotide
cuucuacggcaggggcacc

SEQ ID NO: 7873 - RNA, 19 nt, Artificial Sequence
  Synthetic Oligonucleotide
cugcuacggcagggguacc

SEQ ID NO: 7874 - RNA, 19 nt, Artificial Sequence
  Synthetic Oligonucleotide
uaugagggaagaauaucgg

SEQ ID NO: 7875 - RNA, 19 nt, Artificial Sequence
  Synthetic Oligonucleotide
uaugagggaagaguaucga

SEQ ID NO: 7876 - RNA, 19 nt, Artificial Sequence
  Synthetic Oligonucleotide
uaugagggaggaauaucga

SEQ ID NO: 7877 - RNA, 19 nt, Artificial Sequence
  Synthetic Oligonucleotide
uaugggggaagaauaucga

SEQ ID NO: 7878 - RNA, 19 nt, Artificial Sequence
  Synthetic Oligonucleotide
uaugagggaagaguaucgg

SEQ ID NO: 7879 - RNA, 19 nt, Artificial Sequence
  Synthetic Oligonucleotide
uaugagggaggaguaucga

SEQ ID NO: 7880 - RNA, 19 nt, Artificial Sequence
  Synthetic Oligonucleotide
uaugagggaagaauaucaa

SEQ ID NO: 7881 - RNA, 19 nt, Artificial Sequence
  Synthetic Oligonucleotide
uaugagggaagaauaugga

SEQ ID NO: 7882 - RNA, 19 nt, Artificial Sequence
  Synthetic Oligonucleotide
uaugagggaagaauaccga

SEQ ID NO: 7883 - RNA, 19 nt, Artificial Sequence
  Synthetic Oligonucleotide
uuugagggaagaauaucga

SEQ ID NO: 7884 - RNA, 19 nt, Artificial Sequence
  Synthetic Oligonucleotide
caugagggaagaauaucga

SEQ ID NO: 7885 - RNA, 19 nt, Artificial Sequence
  Synthetic Oligonucleotide
uuugagggaagaauaucgg

SEQ ID NO: 7886 - RNA, 19 nt, Artificial Sequence
  Synthetic Oligonucleotide
caugagggaagaauaucgg

SEQ ID NO: 7887 - RNA, 19 nt, Artificial Sequence
  Synthetic Oligonucleotide
uaugagggaagaguaccgg

SEQ ID NO: 7888 - RNA, 19 nt, Artificial Sequence
  Synthetic Oligonucleotide
uaugagggaacaauauugg

SEQ ID NO: 7889 - RNA, 19 nt, Artificial Sequence
  Synthetic Oligonucleotide
uacuagggaagaauaucga

SEQ ID NO: 7890 - RNA, 19 nt, Artificial Sequence
  Synthetic Oligonucleotide
caugagggaagaauaucaa

SEQ ID NO: 7891 - RNA, 19 nt, Artificial Sequence
  Synthetic Oligonucleotide
caugagggaagaguaucaa

SEQ ID NO: 7892 - RNA, 19 nt, Artificial Sequence
  Synthetic Oligonucleotide
ccuucuacggaaggagugc

SEQ ID NO: 7893 - RNA, 19 nt, Artificial Sequence
  Synthetic Oligonucleotide
ccuucuacggaagggguac

SEQ ID NO: 7894 - RNA, 19 nt, Artificial Sequence
  Synthetic Oligonucleotide
ccuucuacggagggaguac

SEQ ID NO: 7895 - RNA, 19 nt, Artificial Sequence
  Synthetic Oligonucleotide
ccuucuacgggaggaguac

SEQ ID NO: 7896 - RNA, 19 nt, Artificial Sequence
  Synthetic Oligonucleotide
ccuucuauggaaggaguac

SEQ ID NO: 7897 - RNA, 19 nt, Artificial Sequence
  Synthetic Oligonucleotide
ccuuuuacggaaggaguac

SEQ ID NO: 7898 - RNA, 19 nt, Artificial Sequence
  Synthetic Oligonucleotide
ucuucuacggaaggaguac

SEQ ID NO: 7899 - RNA, 19 nt, Artificial Sequence
  Synthetic Oligonucleotide
ccuucuacggaaggggugc

SEQ ID NO: 7900 - RNA, 19 nt, Artificial Sequence
  Synthetic Oligonucleotide
ccuucuacggaaggaguuc

SEQ ID NO: 7901 - RNA, 19 nt, Artificial Sequence
  Synthetic Oligonucleotide
ccuucuacggaaggaauac

SEQ ID NO: 7902 - RNA, 19 nt, Artificial Sequence
  Synthetic Oligonucleotide
ccuucuacggauggaguac

SEQ ID NO: 7903 - RNA, 19 nt, Artificial Sequence
  Synthetic Oligonucleotide
ccuucuacagaaggaguac

SEQ ID NO: 7904 - RNA, 19 nt, Artificial Sequence
  Synthetic Oligonucleotide
ccuuccacggaaggaguac

SEQ ID NO: 7905 - RNA, 19 nt, Artificial Sequence
  Synthetic Oligonucleotide
ccuuguacggaaggaguac

SEQ ID NO: 7906 - RNA, 19 nt, Artificial Sequence
  Synthetic Oligonucleotide
ccugcuacggaaggaguac

SEQ ID NO: 7907 - RNA, 19 nt, Artificial Sequence
  Synthetic Oligonucleotide
cauucuacggaaggaguac

SEQ ID NO: 7908 - RNA, 19 nt, Artificial Sequence
  Synthetic Oligonucleotide
gcuucuacggaaggaguac

SEQ ID NO: 7909 - RNA, 19 nt, Artificial Sequence
  Synthetic Oligonucleotide
ccuucuacggcagggguac

SEQ ID NO: 7910 - RNA, 19 nt, Artificial Sequence
  Synthetic Oligonucleotide
ccuccuacggaaggagugc

SEQ ID NO: 7911 - RNA, 19 nt, Artificial Sequence
  Synthetic Oligonucleotide
ccuucuauggcagggguac

SEQ ID NO: 7912 - RNA, 19 nt, Artificial Sequence
  Synthetic Oligonucleotide
ccuucuacagauggaguac

SEQ ID NO: 7913 - RNA, 19 nt, Artificial Sequence
  Synthetic Oligonucleotide
ccucauacggaaggaguac

SEQ ID NO: 7914 - RNA, 19 nt, Artificial Sequence
  Synthetic Oligonucleotide
ccuucuacggcaggggcac

SEQ ID NO: 7915 - RNA, 19 nt, Artificial Sequence
  Synthetic Oligonucleotide
ccugcuacggcagggguac

SEQ ID NO: 7916 - RNA, 19 nt, Artificial Sequence
  Synthetic Oligonucleotide
uucugcuggugcacuugcu

SEQ ID NO: 7917 - RNA, 19 nt, Artificial Sequence
  Synthetic Oligonucleotide
uucugcuggugcgcuugcc

SEQ ID NO: 7918 - RNA, 19 nt, Artificial Sequence
  Synthetic Oligonucleotide
uucugcuggugcacuagcc

SEQ ID NO: 7919 - RNA, 19 nt, Artificial Sequence
  Synthetic Oligonucleotide
uucugcuggugcacucgcc

SEQ ID NO: 7920 - RNA, 19 nt, Artificial Sequence
  Synthetic Oligonucleotide
uucugcuggagcacuugcc

SEQ ID NO: 7921 - RNA, 19 nt, Artificial Sequence
  Synthetic Oligonucleotide
uucugcuggcgcacuugcc

SEQ ID NO: 7922 - RNA, 19 nt, Artificial Sequence
  Synthetic Oligonucleotide
uucugccggugcacuugcc

SEQ ID NO: 7923 - RNA, 19 nt, Artificial Sequence
  Synthetic Oligonucleotide
uuccgcuggugcacuugcc

SEQ ID NO: 7924 - RNA, 19 nt, Artificial Sequence
  Synthetic Oligonucleotide
uucggcuggugcacuugcc

SEQ ID NO: 7925 - RNA, 19 nt, Artificial Sequence
  Synthetic Oligonucleotide
cucugcuggugcacuugcc

SEQ ID NO: 7926 - RNA, 19 nt, Artificial Sequence
  Synthetic Oligonucleotide
uucaacuggugcacuugcc

SEQ ID NO: 7927 - RNA, 19 nt, Artificial Sequence
  Synthetic Oligonucleotide
cucaacuggugcacuugcc

SEQ ID NO: 7928 - RNA, 19 nt, Artificial Sequence
  Synthetic Oligonucleotide
uuccauggggccaaagaag

SEQ ID NO: 7929 - RNA, 19 nt, Artificial Sequence
  Synthetic Oligonucleotide
uuccauggggccaaagaga

SEQ ID NO: 7930 - RNA, 19 nt, Artificial Sequence
  Synthetic Oligonucleotide
uuccauggggccaaaggaa

SEQ ID NO: 7931 - RNA, 19 nt, Artificial Sequence
  Synthetic Oligonucleotide
uuccauggggccaaggaaa

SEQ ID NO: 7932 - RNA, 19 nt, Artificial Sequence
  Synthetic Oligonucleotide
uuccauggggcuaaagaaa

SEQ ID NO: 7933 - RNA, 19 nt, Artificial Sequence
  Synthetic Oligonucleotide
uucuauggggccaaagaaa

SEQ ID NO: 7934 - RNA, 19 nt, Artificial Sequence
  Synthetic Oligonucleotide
uuucauggggccaaagaaa

SEQ ID NO: 7935 - RNA, 19 nt, Artificial Sequence
  Synthetic Oligonucleotide
uuccauggggccaaggaag

SEQ ID NO: 7936 - RNA, 19 nt, Artificial Sequence
  Synthetic Oligonucleotide
uuccauggggccaaggagg

SEQ ID NO: 7937 - RNA, 19 nt, Artificial Sequence
  Synthetic Oligonucleotide
uuccauggggcuaaagagg

SEQ ID NO: 7938 - RNA, 19 nt, Artificial Sequence
  Synthetic Oligonucleotide
uuucauggggccaaagagg

SEQ ID NO: 7939 - RNA, 19 nt, Artificial Sequence
  Synthetic Oligonucleotide
uuccauggagccaaagaaa

SEQ ID NO: 7940 - RNA, 19 nt, Artificial Sequence
  Synthetic Oligonucleotide
uuccacggggccaaagaaa

SEQ ID NO: 7941 - RNA, 19 nt, Artificial Sequence
  Synthetic Oligonucleotide
uuacauggggccaaagaaa

SEQ ID NO: 7942 - RNA, 19 nt, Artificial Sequence
  Synthetic Oligonucleotide
uuccauggggcaaaagaag

SEQ ID NO: 7943 - RNA, 19 nt, Artificial Sequence
  Synthetic Oligonucleotide
uuccacggggccaaagaag

SEQ ID NO: 7944 - RNA, 19 nt, Artificial Sequence
  Synthetic Oligonucleotide
uuucauggggccaaaguaa

SEQ ID NO: 7945 - RNA, 19 nt, Artificial Sequence
  Synthetic Oligonucleotide
auggggccaaagaaguagc

SEQ ID NO: 7946 - RNA, 19 nt, Artificial Sequence
  Synthetic Oligonucleotide
auggggccaaagagauagc

SEQ ID NO: 7947 - RNA, 19 nt, Artificial Sequence
  Synthetic Oligonucleotide
auggggccaaaggaauagc

SEQ ID NO: 7948 - RNA, 19 nt, Artificial Sequence
  Synthetic Oligonucleotide
auggggccaaggaaauagc

SEQ ID NO: 7949 - RNA, 19 nt, Artificial Sequence
  Synthetic Oligonucleotide
auggggcuaaagaaauagc

SEQ ID NO: 7950 - RNA, 19 nt, Artificial Sequence
  Synthetic Oligonucleotide
auggggccaaggaaguagc

SEQ ID NO: 7951 - RNA, 19 nt, Artificial Sequence
  Synthetic Oligonucleotide
auggggccaaagaaauauc

SEQ ID NO: 7952 - RNA, 19 nt, Artificial Sequence
  Synthetic Oligonucleotide
auggggccaaagaaaucgc

SEQ ID NO: 7953 - RNA, 19 nt, Artificial Sequence
  Synthetic Oligonucleotide
auggggccaaagaaawagc

SEQ ID NO: 7954 - RNA, 19 nt, Artificial Sequence
  Synthetic Oligonucleotide
auggggccaaaguaauagc

SEQ ID NO: 7955 - RNA, 19 nt, Artificial Sequence
  Synthetic Oligonucleotide
auggagccaaagaaauagc

SEQ ID NO: 7956 - RNA, 19 nt, Artificial Sequence
  Synthetic Oligonucleotide
acggggccaaagaaauagc

SEQ ID NO: 7957 - RNA, 19 nt, Artificial Sequence
  Synthetic Oligonucleotide
acggggccaaagaaguagc

SEQ ID NO: 7958 - RNA, 19 nt, Artificial Sequence
  Synthetic Oligonucleotide
auggggcaaaagaaguggc

SEQ ID NO: 7959 - RNA, 19 nt, Artificial Sequence
  Synthetic Oligonucleotide
auggggccaaagaaaucuc

SEQ ID NO: 7960 - RNA, 19 nt, Artificial Sequence
  Synthetic Oligonucleotide
uccauggggccaaagaagu

SEQ ID NO: 7961 - RNA, 19 nt, Artificial Sequence
  Synthetic Oligonucleotide
uccauggggccaaagagau

SEQ ID NO: 7962 - RNA, 19 nt, Artificial Sequence
  Synthetic Oligonucleotide
uccauggggccaaaggaau

SEQ ID NO: 7963 - RNA, 19 nt, Artificial Sequence
  Synthetic Oligonucleotide
uccauggggccaaggaaau

SEQ ID NO: 7964 - RNA, 19 nt, Artificial Sequence
  Synthetic Oligonucleotide
uccauggggcuaaagaaau

SEQ ID NO: 7965 - RNA, 19 nt, Artificial Sequence
  Synthetic Oligonucleotide
ucuauggggccaaagaaau

SEQ ID NO: 7966 - RNA, 19 nt, Artificial Sequence
  Synthetic Oligonucleotide
uucauggggccaaagaaau

SEQ ID NO: 7967 - RNA, 19 nt, Artificial Sequence
  Synthetic Oligonucleotide
uccauggggccaaggaagu

SEQ ID NO: 7968 - RNA, 19 nt, Artificial Sequence
  Synthetic Oligonucleotide
uccauggggccaaggaggu

SEQ ID NO: 7969 - RNA, 19 nt, Artificial Sequence
  Synthetic Oligonucleotide
uccauggggcuaaagaggu

SEQ ID NO: 7970 - RNA, 19 nt, Artificial Sequence
  Synthetic Oligonucleotide
uucauggggccaaagaggu

SEQ ID NO: 7971 - RNA, 19 nt, Artificial Sequence
  Synthetic Oligonucleotide
uccauggggccaaagaaaw

SEQ ID NO: 7972 - RNA, 19 nt, Artificial Sequence
  Synthetic Oligonucleotide
uccauggagccaaagaaau

SEQ ID NO: 7973 - RNA, 19 nt, Artificial Sequence
  Synthetic Oligonucleotide
uccacggggccaaagaaau

SEQ ID NO: 7974 - RNA, 19 nt, Artificial Sequence
  Synthetic Oligonucleotide
uacauggggccaaagaaau

SEQ ID NO: 7975 - RNA, 19 nt, Artificial Sequence
  Synthetic Oligonucleotide
uccauggggcaaaagaagu

SEQ ID NO: 7976 - RNA, 19 nt, Artificial Sequence
  Synthetic Oligonucleotide
uccacggggccaaagaagu

SEQ ID NO: 7977 - RNA, 19 nt, Artificial Sequence
  Synthetic Oligonucleotide
uucauggggccaaaguaau

SEQ ID NO: 7978 - RNA, 19 nt, Artificial Sequence
  Synthetic Oligonucleotide
cauggggccaaagaaguag

SEQ ID NO: 7979 - RNA, 19 nt, Artificial Sequence
  Synthetic Oligonucleotide
cauggggccaaagagauag

SEQ ID NO: 7980 - RNA, 19 nt, Artificial Sequence
  Synthetic Oligonucleotide
cauggggccaaaggaauag

SEQ ID NO: 7981 - RNA, 19 nt, Artificial Sequence
  Synthetic Oligonucleotide
cauggggccaaggaaauag

SEQ ID NO: 7982 - RNA, 19 nt, Artificial Sequence
  Synthetic Oligonucleotide
cauggggcuaaagaaauag

SEQ ID NO: 7983 - RNA, 19 nt, Artificial Sequence
  Synthetic Oligonucleotide
uauggggccaaagaaauag

SEQ ID NO: 7984 - RNA, 19 nt, Artificial Sequence
  Synthetic Oligonucleotide
cauggggccaaggaaguag

SEQ ID NO: 7985 - RNA, 19 nt, Artificial Sequence
  Synthetic Oligonucleotide
cauggggccaaagaaauau

SEQ ID NO: 7986 - RNA, 19 nt, Artificial Sequence
  Synthetic Oligonucleotide
cauggggccaaagaaaucg

SEQ ID NO: 7987 - RNA, 19 nt, Artificial Sequence
  Synthetic Oligonucleotide
cauggggccaaagaaawag

SEQ ID NO: 7988 - RNA, 19 nt, Artificial Sequence
  Synthetic Oligonucleotide
cauggggccaaaguaauag

SEQ ID NO: 7989 - RNA, 19 nt, Artificial Sequence
  Synthetic Oligonucleotide
cauggagccaaagaaauag

SEQ ID NO: 7990 - RNA, 19 nt, Artificial Sequence
  Synthetic Oligonucleotide
cacggggccaaagaaauag

SEQ ID NO: 7991 - RNA, 19 nt, Artificial Sequence
  Synthetic Oligonucleotide
cacggggccaaagaaguag

SEQ ID NO: 7992 - RNA, 19 nt, Artificial Sequence
  Synthetic Oligonucleotide
uauggggccaaagaaaucg

SEQ ID NO: 7993 - RNA, 19 nt, Artificial Sequence
  Synthetic Oligonucleotide
cauggggcaaaagaagugg

SEQ ID NO: 7994 - RNA, 19 nt, Artificial Sequence
  Synthetic Oligonucleotide
cauggggccaaagaaaucu

SEQ ID NO: 7995 - RNA, 19 nt, Artificial Sequence
  Synthetic Oligonucleotide
ggccagcacuacggcuaag

SEQ ID NO: 7996 - RNA, 19 nt, Artificial Sequence
  Synthetic Oligonucleotide
ggccaguacuacagcuaag

SEQ ID NO: 7997 - RNA, 19 nt, Artificial Sequence
  Synthetic Oligonucleotide
ggcuagcacuacagcuaag

SEQ ID NO: 7998 - RNA, 19 nt, Artificial Sequence
  Synthetic Oligonucleotide
ggccaguacuacggcuaag

SEQ ID NO: 7999 - RNA, 19 nt, Artificial Sequence
  Synthetic Oligonucleotide
ggccagcacuacagcuaaa

SEQ ID NO: 8000 - RNA, 19 nt, Artificial Sequence
  Synthetic Oligonucleotide
ggccagcacuacagccaag

SEQ ID NO: 8001 - RNA, 19 nt, Artificial Sequence
  Synthetic Oligonucleotide
ggccagcacuacagcgaag

SEQ ID NO: 8002 - RNA, 19 nt, Artificial Sequence
  Synthetic Oligonucleotide
ggccagcacuaccgcuaag

SEQ ID NO: 8003 - RNA, 19 nt, Artificial Sequence
  Synthetic Oligonucleotide
ggccagcacaacagcuaag

SEQ ID NO: 8004 - RNA, 19 nt, Artificial Sequence
  Synthetic Oligonucleotide
ggccagcaccacagcuaag

SEQ ID NO: 8005 - RNA, 19 nt, Artificial Sequence
  Synthetic Oligonucleotide
ggccagcaauacagcuaag

SEQ ID NO: 8006 - RNA, 19 nt, Artificial Sequence
  Synthetic Oligonucleotide
ggcaagcacuacagcuaag

SEQ ID NO: 8007 - RNA, 19 nt, Artificial Sequence
  Synthetic Oligonucleotide
agccagcacuacagcuaag

SEQ ID NO: 8008 - RNA, 19 nt, Artificial Sequence
  Synthetic Oligonucleotide
ggccagcauuacagcuaaa

SEQ ID NO: 8009 - RNA, 19 nt, Artificial Sequence
  Synthetic Oligonucleotide
ggcuagcaccacagcuaag

SEQ ID NO: 8010 - RNA, 19 nt, Artificial Sequence
  Synthetic Oligonucleotide
agccagcacuacggcuaag

SEQ ID NO: 8011 - RNA, 19 nt, Artificial Sequence
  Synthetic Oligonucleotide
agcuagcacuacagcuaag

SEQ ID NO: 8012 - RNA, 19 nt, Artificial Sequence
  Synthetic Oligonucleotide
ggccagcacuacagcuuau

SEQ ID NO: 8013 - RNA, 19 nt, Artificial Sequence
  Synthetic Oligonucleotide
agccagcacuacagcuaaa

SEQ ID NO: 8014 - RNA, 19 nt, Artificial Sequence
  Synthetic Oligonucleotide
agccagcacuacagccaag

SEQ ID NO: 8015 - RNA, 19 nt, Artificial Sequence
  Synthetic Oligonucleotide
agccagcacaacagcuaag

SEQ ID NO: 8016 - RNA, 19 nt, Artificial Sequence
  Synthetic Oligonucleotide
agccagcaccacggcuaag

SEQ ID NO: 8017 - RNA, 19 nt, Artificial Sequence
  Synthetic Oligonucleotide
agccagcacaacagcuaaa

SEQ ID NO: 8018 - RNA, 19 nt, Artificial Sequence
  Synthetic Oligonucleotide
ucauuuugucagcauaggg

SEQ ID NO: 8019 - RNA, 19 nt, Artificial Sequence
  Synthetic Oligonucleotide
ucauuuugucagcauggag

SEQ ID NO: 8020 - RNA, 19 nt, Artificial Sequence
  Synthetic Oligonucleotide
ucauuuugucaguauagag

SEQ ID NO: 8021 - RNA, 19 nt, Artificial Sequence
  Synthetic Oligonucleotide
ucguuuugucagcauagag

SEQ ID NO: 8022 - RNA, 19 nt, Artificial Sequence
  Synthetic Oligonucleotide
uuauuuugucagcauagag

SEQ ID NO: 8023 - RNA, 19 nt, Artificial Sequence
  Synthetic Oligonucleotide
ucauuuugucagcauagaa

SEQ ID NO: 8024 - RNA, 19 nt, Artificial Sequence
  Synthetic Oligonucleotide
ucauuuugucagcauagau

SEQ ID NO: 8025 - RNA, 19 nt, Artificial Sequence
  Synthetic Oligonucleotide
ucauuuugucagcauaaag

SEQ ID NO: 8026 - RNA, 19 nt, Artificial Sequence
  Synthetic Oligonucleotide
ucauuuugucagcauacag

SEQ ID NO: 8027 - RNA, 19 nt, Artificial Sequence
  Synthetic Oligonucleotide
ucauuuugucaacauagag

SEQ ID NO: 8028 - RNA, 19 nt, Artificial Sequence
  Synthetic Oligonucleotide
ucauuuuguaagcauagag

SEQ ID NO: 8029 - RNA, 19 nt, Artificial Sequence
  Synthetic Oligonucleotide
ucauuuugccagcauagag

SEQ ID NO: 8030 - RNA, 19 nt, Artificial Sequence
  Synthetic Oligonucleotide
ucauucugucagcauagag

SEQ ID NO: 8031 - RNA, 19 nt, Artificial Sequence
  Synthetic Oligonucleotide
ucaauuugucagcauagag

SEQ ID NO: 8032 - RNA, 19 nt, Artificial Sequence
  Synthetic Oligonucleotide
ucuuuuugucagcauagag

SEQ ID NO: 8033 - RNA, 19 nt, Artificial Sequence
  Synthetic Oligonucleotide
ucauuuugucaacauagaa

SEQ ID NO: 8034 - RNA, 19 nt, Artificial Sequence
  Synthetic Oligonucleotide
ucauuuugucaacauagug

SEQ ID NO: 8035 - RNA, 19 nt, Artificial Sequence
  Synthetic Oligonucleotide
ucauuucgucaacauagag

SEQ ID NO: 8036 - RNA, 19 nt, Artificial Sequence
  Synthetic Oligonucleotide
gcauuuugucaacauagag

SEQ ID NO: 8037 - RNA, 19 nt, Artificial Sequence
  Synthetic Oligonucleotide
ucguuuugucaacauagaa

SEQ ID NO: 8038 - RNA, 19 nt, Artificial Sequence
  Synthetic Oligonucleotide
ucauuuugucaucauacau

SEQ ID NO: 8039 - RNA, 19 nt, Artificial Sequence
  Synthetic Oligonucleotide
ccauuuugucaacauagaa

SEQ ID NO: 8040 - RNA, 19 nt, Artificial Sequence
  Synthetic Oligonucleotide
cauuuuugucagcauagag

SEQ ID NO: 8041 - RNA, 19 nt, Artificial Sequence
  Synthetic Oligonucleotide
ccauggggccaaagaagua

SEQ ID NO: 8042 - RNA, 19 nt, Artificial Sequence
  Synthetic Oligonucleotide
ccauggggccaaagagaua

SEQ ID NO: 8043 - RNA, 19 nt, Artificial Sequence
  Synthetic Oligonucleotide
ccauggggccaaaggaaua

SEQ ID NO: 8044 - RNA, 19 nt, Artificial Sequence
  Synthetic Oligonucleotide
ccauggggccaaggaaaua

SEQ ID NO: 8045 - RNA, 19 nt, Artificial Sequence
  Synthetic Oligonucleotide
ccauggggcuaaagaaaua

SEQ ID NO: 8046 - RNA, 19 nt, Artificial Sequence
  Synthetic Oligonucleotide
cuauggggccaaagaaaua

SEQ ID NO: 8047 - RNA, 19 nt, Artificial Sequence
  Synthetic Oligonucleotide
ucauggggccaaagaaaua

SEQ ID NO: 8048 - RNA, 19 nt, Artificial Sequence
  Synthetic Oligonucleotide
ccauggggccaaggaagua

SEQ ID NO: 8049 - RNA, 19 nt, Artificial Sequence
  Synthetic Oligonucleotide
ccauggggccaaagaaauc

SEQ ID NO: 8050 - RNA, 19 nt, Artificial Sequence
  Synthetic Oligonucleotide
ccauggggccaaagaaawa

SEQ ID NO: 8051 - RNA, 19 nt, Artificial Sequence
  Synthetic Oligonucleotide
ccauggagccaaagaaaua

SEQ ID NO: 8052 - RNA, 19 nt, Artificial Sequence
  Synthetic Oligonucleotide
ccacggggccaaagaaaua

SEQ ID NO: 8053 - RNA, 19 nt, Artificial Sequence
  Synthetic Oligonucleotide
acauggggccaaagaaaua

SEQ ID NO: 8054 - RNA, 19 nt, Artificial Sequence
  Synthetic Oligonucleotide
ccacggggccaaagaagua

SEQ ID NO: 8055 - RNA, 19 nt, Artificial Sequence
  Synthetic Oligonucleotide
cuauggggccaaagaaauc

SEQ ID NO: 8056 - RNA, 19 nt, Artificial Sequence
  Synthetic Oligonucleotide
ucauggggccaaaguaaua

SEQ ID NO: 8057 - RNA, 19 nt, Artificial Sequence
  Synthetic Oligonucleotide
ccauggggcaaaagaagug

SEQ ID NO: 8058 - RNA, 19 nt, Artificial Sequence
  Synthetic Oligonucleotide
cucauggaauggcugaaga

SEQ ID NO: 8059 - RNA, 19 nt, Artificial Sequence
  Synthetic Oligonucleotide
cucauggaaugguuaaaga

SEQ ID NO: 8060 - RNA, 19 nt, Artificial Sequence
  Synthetic Oligonucleotide
cucauggaguggcuaaaga

SEQ ID NO: 8061 - RNA, 19 nt, Artificial Sequence
  Synthetic Oligonucleotide
cucauggaguggcugaaga

SEQ ID NO: 8062 - RNA, 19 nt, Artificial Sequence
  Synthetic Oligonucleotide
cucauggaauggcuaaagc

SEQ ID NO: 8063 - RNA, 19 nt, Artificial Sequence
  Synthetic Oligonucleotide
cucacggaauggcuaaaga

SEQ ID NO: 8064 - RNA, 19 nt, Artificial Sequence
  Synthetic Oligonucleotide
cuaauggaauggcuaaaga

SEQ ID NO: 8065 - RNA, 19 nt, Artificial Sequence
  Synthetic Oligonucleotide
ucauggaauggcugaagac

SEQ ID NO: 8066 - RNA, 19 nt, Artificial Sequence
  Synthetic Oligonucleotide
ucauggaaugguuaaagac

SEQ ID NO: 8067 - RNA, 19 nt, Artificial Sequence
  Synthetic Oligonucleotide
ucauggaguggcuaaagac

SEQ ID NO: 8068 - RNA, 19 nt, Artificial Sequence
  Synthetic Oligonucleotide
ucauggaguggcugaagac

SEQ ID NO: 8069 - RNA, 19 nt, Artificial Sequence
  Synthetic Oligonucleotide
ucauggaauggcuaaagcc

SEQ ID NO: 8070 - RNA, 19 nt, Artificial Sequence
  Synthetic Oligonucleotide
ucacggaauggcuaaagac

SEQ ID NO: 8071 - RNA, 19 nt, Artificial Sequence
  Synthetic Oligonucleotide
uaauggaauggcuaaagac

SEQ ID NO: 8072 - RNA, 19 nt, Artificial Sequence
  Synthetic Oligonucleotide
auggaauggcugaagacaa

SEQ ID NO: 8073 - RNA, 19 nt, Artificial Sequence
  Synthetic Oligonucleotide
auggaaugguuaaagacaa

SEQ ID NO: 8074 - RNA, 19 nt, Artificial Sequence
  Synthetic Oligonucleotide
auggaguggcuaaagacaa

SEQ ID NO: 8075 - RNA, 19 nt, Artificial Sequence
  Synthetic Oligonucleotide
auggaguggcugaagacaa

SEQ ID NO: 8076 - RNA, 19 nt, Artificial Sequence
  Synthetic Oligonucleotide
auggaauggcuaaagacua

SEQ ID NO: 8077 - RNA, 19 nt, Artificial Sequence
  Synthetic Oligonucleotide
auggaauggcuaaagccaa

SEQ ID NO: 8078 - RNA, 19 nt, Artificial Sequence
  Synthetic Oligonucleotide
acggaauggcuaaagacaa

SEQ ID NO: 8079 - RNA, 19 nt, Artificial Sequence
  Synthetic Oligonucleotide
cauggaauggcugaagaca

SEQ ID NO: 8080 - RNA, 19 nt, Artificial Sequence
  Synthetic Oligonucleotide
cauggaaugguuaaagaca

SEQ ID NO: 8081 - RNA, 19 nt, Artificial Sequence
  Synthetic Oligonucleotide
cauggaguggcuaaagaca

SEQ ID NO: 8082 - RNA, 19 nt, Artificial Sequence
  Synthetic Oligonucleotide
cauggaguggcugaagaca

SEQ ID NO: 8083 - RNA, 19 nt, Artificial Sequence
  Synthetic Oligonucleotide
cauggaauggcuaaagacu

SEQ ID NO: 8084 - RNA, 19 nt, Artificial Sequence
  Synthetic Oligonucleotide
cauggaauggcuaaagcca

SEQ ID NO: 8085 - RNA, 19 nt, Artificial Sequence
  Synthetic Oligonucleotide
cacggaauggcuaaagaca

SEQ ID NO: 8086 - RNA, 19 nt, Artificial Sequence
  Synthetic Oligonucleotide
aauggaauggcuaaagaca

SEQ ID NO: 8087 - RNA, 19 nt, Artificial Sequence
  Synthetic Oligonucleotide
ucucauggaauggcugaag

SEQ ID NO: 8088 - RNA, 19 nt, Artificial Sequence
  Synthetic Oligonucleotide
ucucauggaaugguuaaag

SEQ ID NO: 8089 - RNA, 19 nt, Artificial Sequence
  Synthetic Oligonucleotide
ucucauggaguggcuaaag

SEQ ID NO: 8090 - RNA, 19 nt, Artificial Sequence
  Synthetic Oligonucleotide
ucucauggaguggcugaag

SEQ ID NO: 8091 - RNA, 19 nt, Artificial Sequence
  Synthetic Oligonucleotide
ucucacggaauggcuaaag

SEQ ID NO: 8092 - RNA, 19 nt, Artificial Sequence
  Synthetic Oligonucleotide
ucuaauggaauggcuaaag

SEQ ID NO: 8093 - RNA, 19 nt, Artificial Sequence
  Synthetic Oligonucleotide
acucauggaauggcuaaag

SEQ ID NO: 8094 - RNA, 19 nt, Artificial Sequence
  Synthetic Oligonucleotide
uggaauggcugaagacaag

SEQ ID NO: 8095 - RNA, 19 nt, Artificial Sequence
  Synthetic Oligonucleotide
uggaaugguuaaagacaag

SEQ ID NO: 8096 - RNA, 19 nt, Artificial Sequence
  Synthetic Oligonucleotide
uggaguggcuaaagacaag

SEQ ID NO: 8097 - RNA, 19 nt, Artificial Sequence
  Synthetic Oligonucleotide
uggaguggcugaagacaag

SEQ ID NO: 8098 - RNA, 19 nt, Artificial Sequence
  Synthetic Oligonucleotide
uggaauggcuaaagacaaa

SEQ ID NO: 8099 - RNA, 19 nt, Artificial Sequence
  Synthetic Oligonucleotide
uggaauggcuaaagacuag

SEQ ID NO: 8100 - RNA, 19 nt, Artificial Sequence
  Synthetic Oligonucleotide
uggaauggcuaaagccaag

SEQ ID NO: 8101 - RNA, 19 nt, Artificial Sequence
  Synthetic Oligonucleotide
cggaauggcuaaagacaag

SEQ ID NO: 8102 - RNA, 19 nt, Artificial Sequence
  Synthetic Oligonucleotide
gucauuuugucagcauagg

SEQ ID NO: 8103 - RNA, 19 nt, Artificial Sequence
  Synthetic Oligonucleotide
gucauuuugucagcaugga

SEQ ID NO: 8104 - RNA, 19 nt, Artificial Sequence
  Synthetic Oligonucleotide
gucauuuugucaguauaga

SEQ ID NO: 8105 - RNA, 19 nt, Artificial Sequence
  Synthetic Oligonucleotide
gucguuuugucagcauaga

SEQ ID NO: 8106 - RNA, 19 nt, Artificial Sequence
  Synthetic Oligonucleotide
guuauuuugucagcauaga

SEQ ID NO: 8107 - RNA, 19 nt, Artificial Sequence
  Synthetic Oligonucleotide
gucauuuugucagcauaaa

SEQ ID NO: 8108 - RNA, 19 nt, Artificial Sequence
  Synthetic Oligonucleotide
gucauuuugucagcauaca

SEQ ID NO: 8109 - RNA, 19 nt, Artificial Sequence
  Synthetic Oligonucleotide
gucauuuugucaacauaga

SEQ ID NO: 8110 - RNA, 19 nt, Artificial Sequence
  Synthetic Oligonucleotide
gucauuuuguaagcauaga

SEQ ID NO: 8111 - RNA, 19 nt, Artificial Sequence
  Synthetic Oligonucleotide
gucauuuugccagcauaga

SEQ ID NO: 8112 - RNA, 19 nt, Artificial Sequence
  Synthetic Oligonucleotide
gucauucugucagcauaga

SEQ ID NO: 8113 - RNA, 19 nt, Artificial Sequence
  Synthetic Oligonucleotide
gucaauuugucagcauaga

SEQ ID NO: 8114 - RNA, 19 nt, Artificial Sequence
  Synthetic Oligonucleotide
gucuuuuugucagcauaga

SEQ ID NO: 8115 - RNA, 19 nt, Artificial Sequence
  Synthetic Oligonucleotide
aucauuuugucagcauaga

SEQ ID NO: 8116 - RNA, 19 nt, Artificial Sequence
  Synthetic Oligonucleotide
gucguuuugucaacauaga

SEQ ID NO: 8117 - RNA, 19 nt, Artificial Sequence
  Synthetic Oligonucleotide
gucauuuugucaacauagu

SEQ ID NO: 8118 - RNA, 19 nt, Artificial Sequence
  Synthetic Oligonucleotide
gucauuuugucaucauaca

SEQ ID NO: 8119 - RNA, 19 nt, Artificial Sequence
  Synthetic Oligonucleotide
gucauuucgucaacauaga

SEQ ID NO: 8120 - RNA, 19 nt, Artificial Sequence
  Synthetic Oligonucleotide
gccauuuugucaacauaga

SEQ ID NO: 8121 - RNA, 19 nt, Artificial Sequence
  Synthetic Oligonucleotide
aucauuuugucaacauaga

SEQ ID NO: 8122 - RNA, 19 nt, Artificial Sequence
  Synthetic Oligonucleotide
ugcauuuugucaacauaga

SEQ ID NO: 8123 - RNA, 19 nt, Artificial Sequence
  Synthetic Oligonucleotide
ggaauggcuaaagacaagg

SEQ ID NO: 8124 - RNA, 19 nt, Artificial Sequence
  Synthetic Oligonucleotide
ggaauggcugaagacaaga

SEQ ID NO: 8125 - RNA, 19 nt, Artificial Sequence
  Synthetic Oligonucleotide
ggaaugguuaaagacaaga

SEQ ID NO: 8126 - RNA, 19 nt, Artificial Sequence
  Synthetic Oligonucleotide
ggaguggcuaaagacaaga

SEQ ID NO: 8127 - RNA, 19 nt, Artificial Sequence
  Synthetic Oligonucleotide
ggaguggcugaagacaaga

SEQ ID NO: 8128 - RNA, 19 nt, Artificial Sequence
  Synthetic Oligonucleotide
ggaauggcuaaagacaaaa

SEQ ID NO: 8129 - RNA, 19 nt, Artificial Sequence
  Synthetic Oligonucleotide
ggaauggcuaaagacuaga

SEQ ID NO: 8130 - RNA, 19 nt, Artificial Sequence
  Synthetic Oligonucleotide
ggaauggcuaaagccaaga

SEQ ID NO: 8131 - RNA, 19 nt, Artificial Sequence
  Synthetic Oligonucleotide
gaauggcuaaagacaagau

SEQ ID NO: 8132 - RNA, 19 nt, Artificial Sequence
  Synthetic Oligonucleotide
gaauggcuaaagacaaggc

SEQ ID NO: 8133 - RNA, 19 nt, Artificial Sequence
  Synthetic Oligonucleotide
gaauggcugaagacaagac

SEQ ID NO: 8134 - RNA, 19 nt, Artificial Sequence
  Synthetic Oligonucleotide
gaaugguuaaagacaagac

SEQ ID NO: 8135 - RNA, 19 nt, Artificial Sequence
  Synthetic Oligonucleotide
gaguggcuaaagacaagac

SEQ ID NO: 8136 - RNA, 19 nt, Artificial Sequence
  Synthetic Oligonucleotide
gaguggcugaagacaagac

SEQ ID NO: 8137 - RNA, 19 nt, Artificial Sequence
  Synthetic Oligonucleotide
gaauggcuaaagacaaaac

SEQ ID NO: 8138 - RNA, 19 nt, Artificial Sequence
  Synthetic Oligonucleotide
gaauggcuaaagacuagac

SEQ ID NO: 8139 - RNA, 19 nt, Artificial Sequence
  Synthetic Oligonucleotide
gaauggcuaaagccaagac

SEQ ID NO: 8140 - RNA, 19 nt, Artificial Sequence
  Synthetic Oligonucleotide
aauggcuaaagacaagauc

SEQ ID NO: 8141 - RNA, 19 nt, Artificial Sequence
  Synthetic Oligonucleotide
aauggcuaaagacaaggcc

SEQ ID NO: 8142 - RNA, 19 nt, Artificial Sequence
  Synthetic Oligonucleotide
aauggcugaagacaagacc

SEQ ID NO: 8143 - RNA, 19 nt, Artificial Sequence
  Synthetic Oligonucleotide
aaugguuaaagacaagacc

SEQ ID NO: 8144 - RNA, 19 nt, Artificial Sequence
  Synthetic Oligonucleotide
aguggcuaaagacaagacc

SEQ ID NO: 8145 - RNA, 19 nt, Artificial Sequence
  Synthetic Oligonucleotide
aguggcugaagacaagacc

SEQ ID NO: 8146 - RNA, 19 nt, Artificial Sequence
  Synthetic Oligonucleotide
aauggcuaaagacaaaacc

SEQ ID NO: 8147 - RNA, 19 nt, Artificial Sequence
  Synthetic Oligonucleotide
aauggcuaaagacuagacc

SEQ ID NO: 8148 - RNA, 19 nt, Artificial Sequence
  Synthetic Oligonucleotide
aauggcuaaagccaagacc

SEQ ID NO: 8149 - RNA, 19 nt, Artificial Sequence
  Synthetic Oligonucleotide
gugcagaugcaacgguuca

SEQ ID NO: 8150 - RNA, 19 nt, Artificial Sequence
  Synthetic Oligonucleotide
gugcagaugcagcgauuca

SEQ ID NO: 8151 - RNA, 19 nt, Artificial Sequence
  Synthetic Oligonucleotide
gugcaggugcaacgauuca

SEQ ID NO: 8152 - RNA, 19 nt, Artificial Sequence
  Synthetic Oligonucleotide
gugcagaugcagcgguuca

SEQ ID NO: 8153 - RNA, 19 nt, Artificial Sequence
  Synthetic Oligonucleotide
gugcagauacaacgauuca

SEQ ID NO: 8154 - RNA, 19 nt, Artificial Sequence
  Synthetic Oligonucleotide
gugcagauucaacgauuca

SEQ ID NO: 8155 - RNA, 19 nt, Artificial Sequence
  Synthetic Oligonucleotide
gugcaaaugcaacgauuca

SEQ ID NO: 8156 - RNA, 19 nt, Artificial Sequence
  Synthetic Oligonucleotide
guacagaugcaacgauuca

SEQ ID NO: 8157 - RNA, 19 nt, Artificial Sequence
  Synthetic Oligonucleotide
uugcagaugcaacgauuca

SEQ ID NO: 8158 - RNA, 19 nt, Artificial Sequence
  Synthetic Oligonucleotide
gugcagauacagcgauuca

SEQ ID NO: 8159 - RNA, 19 nt, Artificial Sequence
  Synthetic Oligonucleotide
gugcaaaugcagcgauuca

SEQ ID NO: 8160 - RNA, 19 nt, Artificial Sequence
  Synthetic Oligonucleotide
guacagaugcagcgauuca

SEQ ID NO: 8161 - RNA, 19 nt, Artificial Sequence
  Synthetic Oligonucleotide
gugcaaaugcaucgauuca

SEQ ID NO: 8162 - RNA, 19 nt, Artificial Sequence
  Synthetic Oligonucleotide
gugcaaaugcagagauuca

SEQ ID NO: 8163 - RNA, 19 nt, Artificial Sequence
  Synthetic Oligonucleotide
guacaaaugcagcgauuca

SEQ ID NO: 8164 - RNA, 19 nt, Artificial Sequence
  Synthetic Oligonucleotide
gaggcucucauggaauggu

SEQ ID NO: 8165 - RNA, 19 nt, Artificial Sequence
  Synthetic Oligonucleotide
gaggcucucauggaguggc

SEQ ID NO: 8166 - RNA, 19 nt, Artificial Sequence
  Synthetic Oligonucleotide
gagguucucauggaauggc

SEQ ID NO: 8167 - RNA, 19 nt, Artificial Sequence
  Synthetic Oligonucleotide
gaggcucucacggaauggc

SEQ ID NO: 8168 - RNA, 19 nt, Artificial Sequence
  Synthetic Oligonucleotide
gaggcucuaauggaauggc

SEQ ID NO: 8169 - RNA, 19 nt, Artificial Sequence
  Synthetic Oligonucleotide
gaggcacucauggaauggc

SEQ ID NO: 8170 - RNA, 19 nt, Artificial Sequence
  Synthetic Oligonucleotide
gaagcucucauggaauggc

SEQ ID NO: 8171 - RNA, 19 nt, Artificial Sequence
  Synthetic Oligonucleotide
gaugcucucauggaauggc

SEQ ID NO: 8172 - RNA, 19 nt, Artificial Sequence
  Synthetic Oligonucleotide
gagguucucacggaauggc

SEQ ID NO: 8173 - RNA, 19 nt, Artificial Sequence
  Synthetic Oligonucleotide
ugcagaugcaacgauucag

SEQ ID NO: 8174 - RNA, 19 nt, Artificial Sequence
  Synthetic Oligonucleotide
ugcagaugcaacgguucaa

SEQ ID NO: 8175 - RNA, 19 nt, Artificial Sequence
  Synthetic Oligonucleotide
ugcagaugcagcgauucaa

SEQ ID NO: 8176 - RNA, 19 nt, Artificial Sequence
  Synthetic Oligonucleotide
ugcaggugcaacgauucaa

SEQ ID NO: 8177 - RNA, 19 nt, Artificial Sequence
  Synthetic Oligonucleotide
ugcagaugcagcgguucaa

SEQ ID NO: 8178 - RNA, 19 nt, Artificial Sequence
  Synthetic Oligonucleotide
ugcagauacaacgauucaa

SEQ ID NO: 8179 - RNA, 19 nt, Artificial Sequence
  Synthetic Oligonucleotide
ugcagauucaacgauucaa

SEQ ID NO: 8180 - RNA, 19 nt, Artificial Sequence
  Synthetic Oligonucleotide
ugcaaaugcaacgauucaa

SEQ ID NO: 8181 - RNA, 19 nt, Artificial Sequence
  Synthetic Oligonucleotide
uacagaugcaacgauucaa

SEQ ID NO: 8182 - RNA, 19 nt, Artificial Sequence
  Synthetic Oligonucleotide
ugcagauacagcgauucaa

SEQ ID NO: 8183 - RNA, 19 nt, Artificial Sequence
  Synthetic Oligonucleotide
ugcaaaugcagcgauucaa

SEQ ID NO: 8184 - RNA, 19 nt, Artificial Sequence
  Synthetic Oligonucleotide
uacagaugcagcgauucaa

SEQ ID NO: 8185 - RNA, 19 nt, Artificial Sequence
  Synthetic Oligonucleotide
ugcaaaugcaucgauucaa

SEQ ID NO: 8186 - RNA, 19 nt, Artificial Sequence
  Synthetic Oligonucleotide
ugcaaaugcagagauucaa

SEQ ID NO: 8187 - RNA, 19 nt, Artificial Sequence
  Synthetic Oligonucleotide
uacaaaugcagcgauucaa

SEQ ID NO: 8188 - RNA, 19 nt, Artificial Sequence
  Synthetic Oligonucleotide
aggcucucauggaaugguu

SEQ ID NO: 8189 - RNA, 19 nt, Artificial Sequence
  Synthetic Oligonucleotide
aggcucucauggaguggcu

SEQ ID NO: 8190 - RNA, 19 nt, Artificial Sequence
  Synthetic Oligonucleotide
agguucucauggaauggcu

SEQ ID NO: 8191 - RNA, 19 nt, Artificial Sequence
  Synthetic Oligonucleotide
aggcucucacggaauggcu

SEQ ID NO: 8192 - RNA, 19 nt, Artificial Sequence
  Synthetic Oligonucleotide
aggcucuaauggaauggcu

SEQ ID NO: 8193 - RNA, 19 nt, Artificial Sequence
  Synthetic Oligonucleotide
aggcacucauggaauggcu

SEQ ID NO: 8194 - RNA, 19 nt, Artificial Sequence
  Synthetic Oligonucleotide
aagcucucauggaauggcu

SEQ ID NO: 8195 - RNA, 19 nt, Artificial Sequence
  Synthetic Oligonucleotide
augcucucauggaauggcu

SEQ ID NO: 8196 - RNA, 19 nt, Artificial Sequence
  Synthetic Oligonucleotide
agguucucacggaauggcu

SEQ ID NO: 8197 - RNA, 19 nt, Artificial Sequence
  Synthetic Oligonucleotide
cagagacuugaagauguuu

SEQ ID NO: 8198 - RNA, 19 nt, Artificial Sequence
  Synthetic Oligonucleotide
cagagacuugaggaugucu

SEQ ID NO: 8199 - RNA, 19 nt, Artificial Sequence
  Synthetic Oligonucleotide
cagaggcuugaagaugucu

SEQ ID NO: 8200 - RNA, 19 nt, Artificial Sequence
  Synthetic Oligonucleotide
cagagacuugaggauguuu

SEQ ID NO: 8201 - RNA, 19 nt, Artificial Sequence
  Synthetic Oligonucleotide
cagagacuugaagauguau

SEQ ID NO: 8202 - RNA, 19 nt, Artificial Sequence
  Synthetic Oligonucleotide
cagagacuugaaaaugucu

SEQ ID NO: 8203 - RNA, 19 nt, Artificial Sequence
  Synthetic Oligonucleotide
cagagacuugaauaugucu

SEQ ID NO: 8204 - RNA, 19 nt, Artificial Sequence
  Synthetic Oligonucleotide
cagagacuucaagaugucu

SEQ ID NO: 8205 - RNA, 19 nt, Artificial Sequence
  Synthetic Oligonucleotide
cagagacuggaagaugucu

SEQ ID NO: 8206 - RNA, 19 nt, Artificial Sequence
  Synthetic Oligonucleotide
cagaaacuugaagaugucu

SEQ ID NO: 8207 - RNA, 19 nt, Artificial Sequence
  Synthetic Oligonucleotide
cagagacuggaaggugucu

SEQ ID NO: 8208 - RNA, 19 nt, Artificial Sequence
  Synthetic Oligonucleotide
cagaaacuugaagauguuu

SEQ ID NO: 8209 - RNA, 19 nt, Artificial Sequence
  Synthetic Oligonucleotide
cagaaacuugaggaugucu

SEQ ID NO: 8210 - RNA, 19 nt, Artificial Sequence
  Synthetic Oligonucleotide
cggaaacuugaagaugucu

SEQ ID NO: 8211 - RNA, 19 nt, Artificial Sequence
  Synthetic Oligonucleotide
cagagacuggaagguguuu

SEQ ID NO: 8212 - RNA, 19 nt, Artificial Sequence
  Synthetic Oligonucleotide
cagagacaagaagaugucu

SEQ ID NO: 8213 - RNA, 19 nt, Artificial Sequence
  Synthetic Oligonucleotide
cagaaacuugaagacgucu

SEQ ID NO: 8214 - RNA, 19 nt, Artificial Sequence
  Synthetic Oligonucleotide
cagagacucgaagacguuu

SEQ ID NO: 8215 - RNA, 19 nt, Artificial Sequence
  Synthetic Oligonucleotide
agagacuugaagauguuuu

SEQ ID NO: 8216 - RNA, 19 nt, Artificial Sequence
  Synthetic Oligonucleotide
agagacuugaggaugucuu

SEQ ID NO: 8217 - RNA, 19 nt, Artificial Sequence
  Synthetic Oligonucleotide
agaggcuugaagaugucuu

SEQ ID NO: 8218 - RNA, 19 nt, Artificial Sequence
  Synthetic Oligonucleotide
agagacuugaggauguuuu

SEQ ID NO: 8219 - RNA, 19 nt, Artificial Sequence
  Synthetic Oligonucleotide
agagacuugaagauguauu

SEQ ID NO: 8220 - RNA, 19 nt, Artificial Sequence
  Synthetic Oligonucleotide
agagacuugaaaaugucuu

SEQ ID NO: 8221 - RNA, 19 nt, Artificial Sequence
  Synthetic Oligonucleotide
agagacuugaauaugucuu

SEQ ID NO: 8222 - RNA, 19 nt, Artificial Sequence
  Synthetic Oligonucleotide
agagacuucaagaugucuu

SEQ ID NO: 8223 - RNA, 19 nt, Artificial Sequence
  Synthetic Oligonucleotide
agagacuggaagaugucuu

SEQ ID NO: 8224 - RNA, 19 nt, Artificial Sequence
  Synthetic Oligonucleotide
agaaacuugaagaugucuu

SEQ ID NO: 8225 - RNA, 19 nt, Artificial Sequence
  Synthetic Oligonucleotide
agagacuggaaggugucuu

SEQ ID NO: 8226 - RNA, 19 nt, Artificial Sequence
  Synthetic Oligonucleotide
agaaacuugaagauguuuu

SEQ ID NO: 8227 - RNA, 19 nt, Artificial Sequence
  Synthetic Oligonucleotide
agaaacuugaggaugucuu

SEQ ID NO: 8228 - RNA, 19 nt, Artificial Sequence
  Synthetic Oligonucleotide
ggaaacuugaagaugucuu

SEQ ID NO: 8229 - RNA, 19 nt, Artificial Sequence
  Synthetic Oligonucleotide
agagacuggaagguguuuu

SEQ ID NO: 8230 - RNA, 19 nt, Artificial Sequence
  Synthetic Oligonucleotide
agagacaagaagaugucuu

SEQ ID NO: 8231 - RNA, 19 nt, Artificial Sequence
  Synthetic Oligonucleotide
agaaacuugaagacgucuu

SEQ ID NO: 8232 - RNA, 19 nt, Artificial Sequence
  Synthetic Oligonucleotide
agagacucgaagacguuuu

SEQ ID NO: 8233 - RNA, 19 nt, Artificial Sequence
  Synthetic Oligonucleotide
accucugacuagggggauu

SEQ ID NO: 8234 - RNA, 19 nt, Artificial Sequence
  Synthetic Oligonucleotide
acuucugacuaaggggauu

SEQ ID NO: 8235 - RNA, 19 nt, Artificial Sequence
  Synthetic Oligonucleotide
gccucugacuaaggggauu

SEQ ID NO: 8236 - RNA, 19 nt, Artificial Sequence
  Synthetic Oligonucleotide
accucugacuaaggggauc

SEQ ID NO: 8237 - RNA, 19 nt, Artificial Sequence
  Synthetic Oligonucleotide
accucugacuaaggggauw

SEQ ID NO: 8238 - RNA, 19 nt, Artificial Sequence
  Synthetic Oligonucleotide
accucugacuaagggaauu

SEQ ID NO: 8239 - RNA, 19 nt, Artificial Sequence
  Synthetic Oligonucleotide
accucugacuaaggguauu

SEQ ID NO: 8240 - RNA, 19 nt, Artificial Sequence
  Synthetic Oligonucleotide
accucugacuaaagggauu

SEQ ID NO: 8241 - RNA, 19 nt, Artificial Sequence
  Synthetic Oligonucleotide
accucugacaaaggggauu

SEQ ID NO: 8242 - RNA, 19 nt, Artificial Sequence
  Synthetic Oligonucleotide
accucugaccaaggggauu

SEQ ID NO: 8243 - RNA, 19 nt, Artificial Sequence
  Synthetic Oligonucleotide
accucuaacuaaggggauu

SEQ ID NO: 8244 - RNA, 19 nt, Artificial Sequence
  Synthetic Oligonucleotide
accucuuacuaaggggauu

SEQ ID NO: 8245 - RNA, 19 nt, Artificial Sequence
  Synthetic Oligonucleotide
uccucugacuaaggggauu

SEQ ID NO: 8246 - RNA, 19 nt, Artificial Sequence
  Synthetic Oligonucleotide
accucugacuaaagggauc

SEQ ID NO: 8247 - RNA, 19 nt, Artificial Sequence
  Synthetic Oligonucleotide
accucugacuaaagggaug

SEQ ID NO: 8248 - RNA, 19 nt, Artificial Sequence
  Synthetic Oligonucleotide
accucugacaaaagggauu

SEQ ID NO: 8249 - RNA, 19 nt, Artificial Sequence
  Synthetic Oligonucleotide
accucugaccaagggaauu

SEQ ID NO: 8250 - RNA, 19 nt, Artificial Sequence
  Synthetic Oligonucleotide
accucuaacuaaggggauc

SEQ ID NO: 8251 - RNA, 19 nt, Artificial Sequence
  Synthetic Oligonucleotide
accacugacuaagggaauu

SEQ ID NO: 8252 - RNA, 19 nt, Artificial Sequence
  Synthetic Oligonucleotide
accuuugacuaaagggaug

SEQ ID NO: 8253 - RNA, 19 nt, Artificial Sequence
  Synthetic Oligonucleotide
agacuugaagauguuuuug

SEQ ID NO: 8254 - RNA, 19 nt, Artificial Sequence
  Synthetic Oligonucleotide
agacuugaggaugucuuug

SEQ ID NO: 8255 - RNA, 19 nt, Artificial Sequence
  Synthetic Oligonucleotide
aggcuugaagaugucuuug

SEQ ID NO: 8256 - RNA, 19 nt, Artificial Sequence
  Synthetic Oligonucleotide
agacuugaggauguuuuug

SEQ ID NO: 8257 - RNA, 19 nt, Artificial Sequence
  Synthetic Oligonucleotide
agacuugaagaugucuucg

SEQ ID NO: 8258 - RNA, 19 nt, Artificial Sequence
  Synthetic Oligonucleotide
agacuugaagauguauuug

SEQ ID NO: 8259 - RNA, 19 nt, Artificial Sequence
  Synthetic Oligonucleotide
agacuugaaaaugucuuug

SEQ ID NO: 8260 - RNA, 19 nt, Artificial Sequence
  Synthetic Oligonucleotide
agacuugaauaugucuuug

SEQ ID NO: 8261 - RNA, 19 nt, Artificial Sequence
  Synthetic Oligonucleotide
agacuucaagaugucuuug

SEQ ID NO: 8262 - RNA, 19 nt, Artificial Sequence
  Synthetic Oligonucleotide
agacuggaagaugucuuug

SEQ ID NO: 8263 - RNA, 19 nt, Artificial Sequence
  Synthetic Oligonucleotide
aaacuugaagaugucuuug

SEQ ID NO: 8264 - RNA, 19 nt, Artificial Sequence
  Synthetic Oligonucleotide
agacuggaaggugucuuug

SEQ ID NO: 8265 - RNA, 19 nt, Artificial Sequence
  Synthetic Oligonucleotide
aaacuugaagauguuuuug

SEQ ID NO: 8266 - RNA, 19 nt, Artificial Sequence
  Synthetic Oligonucleotide
aaacuugaggaugucuuug

SEQ ID NO: 8267 - RNA, 19 nt, Artificial Sequence
  Synthetic Oligonucleotide
agacuggaagguguuuuug

SEQ ID NO: 8268 - RNA, 19 nt, Artificial Sequence
  Synthetic Oligonucleotide
agacaagaagaugucuuug

SEQ ID NO: 8269 - RNA, 19 nt, Artificial Sequence
  Synthetic Oligonucleotide
aaacuugaagacgucuuug

SEQ ID NO: 8270 - RNA, 19 nt, Artificial Sequence
  Synthetic Oligonucleotide
agacucgaagacguuuuug

SEQ ID NO: 8271 - RNA, 19 nt, Artificial Sequence
  Synthetic Oligonucleotide
gacuugaagauguuuuugc

SEQ ID NO: 8272 - RNA, 19 nt, Artificial Sequence
  Synthetic Oligonucleotide
gacuugaggaugucuuugc

SEQ ID NO: 8273 - RNA, 19 nt, Artificial Sequence
  Synthetic Oligonucleotide
ggcuugaagaugucuuugc

SEQ ID NO: 8274 - RNA, 19 nt, Artificial Sequence
  Synthetic Oligonucleotide
gacuugaggauguuuuugc

SEQ ID NO: 8275 - RNA, 19 nt, Artificial Sequence
  Synthetic Oligonucleotide
gacuugaagaugucuucgc

SEQ ID NO: 8276 - RNA, 19 nt, Artificial Sequence
  Synthetic Oligonucleotide
gacuugaagauguauuugc

SEQ ID NO: 8277 - RNA, 19 nt, Artificial Sequence
  Synthetic Oligonucleotide
gacuugaaaaugucuuugc

SEQ ID NO: 8278 - RNA, 19 nt, Artificial Sequence
  Synthetic Oligonucleotide
gacuugaauaugucuuugc

SEQ ID NO: 8279 - RNA, 19 nt, Artificial Sequence
  Synthetic Oligonucleotide
gacuucaagaugucuuugc

SEQ ID NO: 8280 - RNA, 19 nt, Artificial Sequence
  Synthetic Oligonucleotide
gacuggaagaugucuuugc

SEQ ID NO: 8281 - RNA, 19 nt, Artificial Sequence
  Synthetic Oligonucleotide
aacuugaagaugucuuugc

SEQ ID NO: 8282 - RNA, 19 nt, Artificial Sequence
  Synthetic Oligonucleotide
gacuggaaggugucuuugc

SEQ ID NO: 8283 - RNA, 19 nt, Artificial Sequence
  Synthetic Oligonucleotide
aacuugaagauguuuuugc

SEQ ID NO: 8284 - RNA, 19 nt, Artificial Sequence
  Synthetic Oligonucleotide
aacuugaggaugucuuugc

SEQ ID NO: 8285 - RNA, 19 nt, Artificial Sequence
  Synthetic Oligonucleotide
gacuggaagguguuuuugc

SEQ ID NO: 8286 - RNA, 19 nt, Artificial Sequence
  Synthetic Oligonucleotide
gacaagaagaugucuuugc

SEQ ID NO: 8287 - RNA, 19 nt, Artificial Sequence
  Synthetic Oligonucleotide
aacuugaagacgucuuugc

SEQ ID NO: 8288 - RNA, 19 nt, Artificial Sequence
  Synthetic Oligonucleotide
gacucgaagacguuuuugc

SEQ ID NO: 8289 - RNA, 19 nt, Artificial Sequence
  Synthetic Oligonucleotide
gagacuugaagauguuuuu

SEQ ID NO: 8290 - RNA, 19 nt, Artificial Sequence
  Synthetic Oligonucleotide
gagacuugaggaugucuuu

SEQ ID NO: 8291 - RNA, 19 nt, Artificial Sequence
  Synthetic Oligonucleotide
gaggcuugaagaugucuuu

SEQ ID NO: 8292 - RNA, 19 nt, Artificial Sequence
  Synthetic Oligonucleotide
gagacuugaggauguuuuu

SEQ ID NO: 8293 - RNA, 19 nt, Artificial Sequence
  Synthetic Oligonucleotide
gagacuugaagaugucuuc

SEQ ID NO: 8294 - RNA, 19 nt, Artificial Sequence
  Synthetic Oligonucleotide
gagacuugaagauguauuu

SEQ ID NO: 8295 - RNA, 19 nt, Artificial Sequence
  Synthetic Oligonucleotide
gagacuugaaaaugucuuu

SEQ ID NO: 8296 - RNA, 19 nt, Artificial Sequence
  Synthetic Oligonucleotide
gagacuugaauaugucuuu

SEQ ID NO: 8297 - RNA, 19 nt, Artificial Sequence
  Synthetic Oligonucleotide
gagacuucaagaugucuuu

SEQ ID NO: 8298 - RNA, 19 nt, Artificial Sequence
  Synthetic Oligonucleotide
gagacuggaagaugucuuu

SEQ ID NO: 8299 - RNA, 19 nt, Artificial Sequence
  Synthetic Oligonucleotide
gaaacuugaagaugucuuu

SEQ ID NO: 8300 - RNA, 19 nt, Artificial Sequence
  Synthetic Oligonucleotide
gagacuggaaggugucuuu

SEQ ID NO: 8301 - RNA, 19 nt, Artificial Sequence
  Synthetic Oligonucleotide
gaaacuugaagauguuuuu

SEQ ID NO: 8302 - RNA, 19 nt, Artificial Sequence
  Synthetic Oligonucleotide
gaaacuugaggaugucuuu

SEQ ID NO: 8303 - RNA, 19 nt, Artificial Sequence
  Synthetic Oligonucleotide
gagacuggaagguguuuuu

SEQ ID NO: 8304 - RNA, 19 nt, Artificial Sequence
  Synthetic Oligonucleotide
gagacaagaagaugucuuu

SEQ ID NO: 8305 - RNA, 19 nt, Artificial Sequence
  Synthetic Oligonucleotide
gaaacuugaagacgucuuu

SEQ ID NO: 8306 - RNA, 19 nt, Artificial Sequence
  Synthetic Oligonucleotide
gagacucgaagacguuuuu

SEQ ID NO: 8307 - RNA, 19 nt, Artificial Sequence
  Synthetic Oligonucleotide
uugaggcucucauggagug

SEQ ID NO: 8308 - RNA, 19 nt, Artificial Sequence
  Synthetic Oligonucleotide
uugagguucucauggaaug

SEQ ID NO: 8309 - RNA, 19 nt, Artificial Sequence
  Synthetic Oligonucleotide
uugaggcucucacggaaug

SEQ ID NO: 8310 - RNA, 19 nt, Artificial Sequence
  Synthetic Oligonucleotide
uugaggcucuaauggaaug

SEQ ID NO: 8311 - RNA, 19 nt, Artificial Sequence
  Synthetic Oligonucleotide
uugaggcacucauggaaug

SEQ ID NO: 8312 - RNA, 19 nt, Artificial Sequence
  Synthetic Oligonucleotide
uugaagcucucauggaaug

SEQ ID NO: 8313 - RNA, 19 nt, Artificial Sequence
  Synthetic Oligonucleotide
uugaugcucucauggaaug

SEQ ID NO: 8314 - RNA, 19 nt, Artificial Sequence
  Synthetic Oligonucleotide
uagaggcucucauggaaug

SEQ ID NO: 8315 - RNA, 19 nt, Artificial Sequence
  Synthetic Oligonucleotide
ucgaggcucucauggaaug

SEQ ID NO: 8316 - RNA, 19 nt, Artificial Sequence
  Synthetic Oligonucleotide
uugagguucucacggaaug

SEQ ID NO: 8317 - RNA, 19 nt, Artificial Sequence
  Synthetic Oligonucleotide
uagaggcucucauggagug

SEQ ID NO: 8318 - RNA, 19 nt, Artificial Sequence
  Synthetic Oligonucleotide
ucgaggcucucauggagug

SEQ ID NO: 8319 - RNA, 19 nt, Artificial Sequence
  Synthetic Oligonucleotide
ucgaggcacucauggaaug

SEQ ID NO: 8320 - RNA, 19 nt, Artificial Sequence
  Synthetic Oligonucleotide
cuugaggcucucauggagu

SEQ ID NO: 8321 - RNA, 19 nt, Artificial Sequence
  Synthetic Oligonucleotide
cuugagguucucauggaau

SEQ ID NO: 8322 - RNA, 19 nt, Artificial Sequence
  Synthetic Oligonucleotide
cuugaggcucucacggaau

SEQ ID NO: 8323 - RNA, 19 nt, Artificial Sequence
  Synthetic Oligonucleotide
cuugaggcucuaauggaau

SEQ ID NO: 8324 - RNA, 19 nt, Artificial Sequence
  Synthetic Oligonucleotide
cuugaggcacucauggaau

SEQ ID NO: 8325 - RNA, 19 nt, Artificial Sequence
  Synthetic Oligonucleotide
cuugaagcucucauggaau

SEQ ID NO: 8326 - RNA, 19 nt, Artificial Sequence
  Synthetic Oligonucleotide
cuugaugcucucauggaau

SEQ ID NO: 8327 - RNA, 19 nt, Artificial Sequence
  Synthetic Oligonucleotide
cuagaggcucucauggaau

SEQ ID NO: 8328 - RNA, 19 nt, Artificial Sequence
  Synthetic Oligonucleotide
cucgaggcucucauggaau

SEQ ID NO: 8329 - RNA, 19 nt, Artificial Sequence
  Synthetic Oligonucleotide
cuugagguucucacggaau

SEQ ID NO: 8330 - RNA, 19 nt, Artificial Sequence
  Synthetic Oligonucleotide
cuagaggcucucauggagu

SEQ ID NO: 8331 - RNA, 19 nt, Artificial Sequence
  Synthetic Oligonucleotide
cucgaggcucucauggagu

SEQ ID NO: 8332 - RNA, 19 nt, Artificial Sequence
  Synthetic Oligonucleotide
cucgaggcacucauggaau

SEQ ID NO: 8333 - RNA, 19 nt, Artificial Sequence
  Synthetic Oligonucleotide
ugaggcucucauggagugg

SEQ ID NO: 8334 - RNA, 19 nt, Artificial Sequence
  Synthetic Oligonucleotide
ugagguucucauggaaugg

SEQ ID NO: 8335 - RNA, 19 nt, Artificial Sequence
  Synthetic Oligonucleotide
ugaggcucucacggaaugg

SEQ ID NO: 8336 - RNA, 19 nt, Artificial Sequence
  Synthetic Oligonucleotide
ugaggcucuaauggaaugg

SEQ ID NO: 8337 - RNA, 19 nt, Artificial Sequence
  Synthetic Oligonucleotide
ugaggcacucauggaaugg

SEQ ID NO: 8338 - RNA, 19 nt, Artificial Sequence
  Synthetic Oligonucleotide
ugaagcucucauggaaugg

SEQ ID NO: 8339 - RNA, 19 nt, Artificial Sequence
  Synthetic Oligonucleotide
ugaugcucucauggaaugg

SEQ ID NO: 8340 - RNA, 19 nt, Artificial Sequence
  Synthetic Oligonucleotide
agaggcucucauggaaugg

SEQ ID NO: 8341 - RNA, 19 nt, Artificial Sequence
  Synthetic Oligonucleotide
cgaggcucucauggaaugg

SEQ ID NO: 8342 - RNA, 19 nt, Artificial Sequence
  Synthetic Oligonucleotide
ugagguucucacggaaugg

SEQ ID NO: 8343 - RNA, 19 nt, Artificial Sequence
  Synthetic Oligonucleotide
agaggcucucauggagugg

SEQ ID NO: 8344 - RNA, 19 nt, Artificial Sequence
  Synthetic Oligonucleotide
cgaggcucucauggagugg

SEQ ID NO: 8345 - RNA, 19 nt, Artificial Sequence
  Synthetic Oligonucleotide
cgaggcacucauggaaugg

SEQ ID NO: 8346 - RNA, 19 nt, Artificial Sequence
  Synthetic Oligonucleotide
cucugacuagggggauuuu

SEQ ID NO: 8347 - RNA, 19 nt, Artificial Sequence
  Synthetic Oligonucleotide
uucugacuaaggggauuuu

SEQ ID NO: 8348 - RNA, 19 nt, Artificial Sequence
  Synthetic Oligonucleotide
cucugacuaaggggauucu

SEQ ID NO: 8349 - RNA, 19 nt, Artificial Sequence
  Synthetic Oligonucleotide
cucugacuaaggggaucuu

SEQ ID NO: 8350 - RNA, 19 nt, Artificial Sequence
  Synthetic Oligonucleotide
cucugacuaagggaauuuu

SEQ ID NO: 8351 - RNA, 19 nt, Artificial Sequence
  Synthetic Oligonucleotide
cucugacuaaggguauuuu

SEQ ID NO: 8352 - RNA, 19 nt, Artificial Sequence
  Synthetic Oligonucleotide
cucugacuaaagggauuuu

SEQ ID NO: 8353 - RNA, 19 nt, Artificial Sequence
  Synthetic Oligonucleotide
cucugacaaaggggauuuu

SEQ ID NO: 8354 - RNA, 19 nt, Artificial Sequence
  Synthetic Oligonucleotide
cucugaccaaggggauuuu

SEQ ID NO: 8355 - RNA, 19 nt, Artificial Sequence
  Synthetic Oligonucleotide
cucuaacuaaggggauuuu

SEQ ID NO: 8356 - RNA, 19 nt, Artificial Sequence
  Synthetic Oligonucleotide
cucuuacuaaggggauuuu

SEQ ID NO: 8357 - RNA, 19 nt, Artificial Sequence
  Synthetic Oligonucleotide
cucugacuaaggggauccu

SEQ ID NO: 8358 - RNA, 19 nt, Artificial Sequence
  Synthetic Oligonucleotide
cucugacuaaggggauwcu

SEQ ID NO: 8359 - RNA, 19 nt, Artificial Sequence
  Synthetic Oligonucleotide
cucugacuaaagggaucuu

SEQ ID NO: 8360 - RNA, 19 nt, Artificial Sequence
  Synthetic Oligonucleotide
cucugacuaaagggauguu

SEQ ID NO: 8361 - RNA, 19 nt, Artificial Sequence
  Synthetic Oligonucleotide
cucugacaaaagggauuuu

SEQ ID NO: 8362 - RNA, 19 nt, Artificial Sequence
  Synthetic Oligonucleotide
cucugaccaagggaauuuu

SEQ ID NO: 8363 - RNA, 19 nt, Artificial Sequence
  Synthetic Oligonucleotide
cacugacuaagggaauuuu

SEQ ID NO: 8364 - RNA, 19 nt, Artificial Sequence
  Synthetic Oligonucleotide
cuuugacuaaagggauguu

SEQ ID NO: 8365 - RNA, 19 nt, Artificial Sequence
  Synthetic Oligonucleotide
cucuaacuaaggggauccu

SEQ ID NO: 8366 - RNA, 19 nt, Artificial Sequence
  Synthetic Oligonucleotide
cagcagagugcuguggaug

SEQ ID NO: 8367 - RNA, 19 nt, Artificial Sequence
  Synthetic Oligonucleotide
cagcaggaugcuguggaug

SEQ ID NO: 8368 - RNA, 19 nt, Artificial Sequence
  Synthetic Oligonucleotide
cagcagaaugcuguggaua

SEQ ID NO: 8369 - RNA, 19 nt, Artificial Sequence
  Synthetic Oligonucleotide
cagcagaaugcuguggaag

SEQ ID NO: 8370 - RNA, 19 nt, Artificial Sequence
  Synthetic Oligonucleotide
cagcagaaugcuguggagg

SEQ ID NO: 8371 - RNA, 19 nt, Artificial Sequence
  Synthetic Oligonucleotide
cagcagaaugcugugaaug

SEQ ID NO: 8372 - RNA, 19 nt, Artificial Sequence
  Synthetic Oligonucleotide
cagcagaaugcuguagaug

SEQ ID NO: 8373 - RNA, 19 nt, Artificial Sequence
  Synthetic Oligonucleotide
cagcagaaugcugcggaug

SEQ ID NO: 8374 - RNA, 19 nt, Artificial Sequence
  Synthetic Oligonucleotide
cagcagaaugcuggggaug

SEQ ID NO: 8375 - RNA, 19 nt, Artificial Sequence
  Synthetic Oligonucleotide
cagcagaaugcuauggaug

SEQ ID NO: 8376 - RNA, 19 nt, Artificial Sequence
  Synthetic Oligonucleotide
cagcagaaugcuuuggaug

SEQ ID NO: 8377 - RNA, 19 nt, Artificial Sequence
  Synthetic Oligonucleotide
cagcagaaagcuguggaug

SEQ ID NO: 8378 - RNA, 19 nt, Artificial Sequence
  Synthetic Oligonucleotide
cagcagaacgcuguggaug

SEQ ID NO: 8379 - RNA, 19 nt, Artificial Sequence
  Synthetic Oligonucleotide
cagcaaaaugcuguggaug

SEQ ID NO: 8380 - RNA, 19 nt, Artificial Sequence
  Synthetic Oligonucleotide
cagcauaaugcuguggaug

SEQ ID NO: 8381 - RNA, 19 nt, Artificial Sequence
  Synthetic Oligonucleotide
cagcagagugcuguggaua

SEQ ID NO: 8382 - RNA, 19 nt, Artificial Sequence
  Synthetic Oligonucleotide
cagcagagugcuguagaug

SEQ ID NO: 8383 - RNA, 19 nt, Artificial Sequence
  Synthetic Oligonucleotide
cagcaaagugcuguggaug

SEQ ID NO: 8384 - RNA, 19 nt, Artificial Sequence
  Synthetic Oligonucleotide
cagcagaaugcuguggaca

SEQ ID NO: 8385 - RNA, 19 nt, Artificial Sequence
  Synthetic Oligonucleotide
cagcagaguuauguggaug

SEQ ID NO: 8386 - RNA, 19 nt, Artificial Sequence
  Synthetic Oligonucleotide
ccucugacuagggggauuu

SEQ ID NO: 8387 - RNA, 19 nt, Artificial Sequence
  Synthetic Oligonucleotide
cuucugacuaaggggauuu

SEQ ID NO: 8388 - RNA, 19 nt, Artificial Sequence
  Synthetic Oligonucleotide
ccucugacuaaggggauuc

SEQ ID NO: 8389 - RNA, 19 nt, Artificial Sequence
  Synthetic Oligonucleotide
ccucugacuaaggggaucu

SEQ ID NO: 8390 - RNA, 19 nt, Artificial Sequence
  Synthetic Oligonucleotide
ccucugacuaagggaauuu

SEQ ID NO: 8391 - RNA, 19 nt, Artificial Sequence
  Synthetic Oligonucleotide
ccucugacuaaggguauuu

SEQ ID NO: 8392 - RNA, 19 nt, Artificial Sequence
  Synthetic Oligonucleotide
ccucugacuaaagggauuu

SEQ ID NO: 8393 - RNA, 19 nt, Artificial Sequence
  Synthetic Oligonucleotide
ccucugacaaaggggauuu

SEQ ID NO: 8394 - RNA, 19 nt, Artificial Sequence
  Synthetic Oligonucleotide
ccucugaccaaggggauuu

SEQ ID NO: 8395 - RNA, 19 nt, Artificial Sequence
  Synthetic Oligonucleotide
ccucuaacuaaggggauuu

SEQ ID NO: 8396 - RNA, 19 nt, Artificial Sequence
  Synthetic Oligonucleotide
ccucuuacuaaggggauuu

SEQ ID NO: 8397 - RNA, 19 nt, Artificial Sequence
  Synthetic Oligonucleotide
ccucugacuaaggggaucc

SEQ ID NO: 8398 - RNA, 19 nt, Artificial Sequence
  Synthetic Oligonucleotide
ccucugacuaaggggauwc

SEQ ID NO: 8399 - RNA, 19 nt, Artificial Sequence
  Synthetic Oligonucleotide
ccucugacuaaagggaucu

SEQ ID NO: 8400 - RNA, 19 nt, Artificial Sequence
  Synthetic Oligonucleotide
ccucugacuaaagggaugu

SEQ ID NO: 8401 - RNA, 19 nt, Artificial Sequence
  Synthetic Oligonucleotide
ccucugacaaaagggauuu

SEQ ID NO: 8402 - RNA, 19 nt, Artificial Sequence
  Synthetic Oligonucleotide
ccucugaccaagggaauuu

SEQ ID NO: 8403 - RNA, 19 nt, Artificial Sequence
  Synthetic Oligonucleotide
ccacugacuaagggaauuu

SEQ ID NO: 8404 - RNA, 19 nt, Artificial Sequence
  Synthetic Oligonucleotide
ccuuugacuaaagggaugu

SEQ ID NO: 8405 - RNA, 19 nt, Artificial Sequence
  Synthetic Oligonucleotide
ccucuaacuaaggggaucc

SEQ ID NO: 8406 - RNA, 19 nt, Artificial Sequence
  Synthetic Oligonucleotide
gcucucauggaauggcuga

SEQ ID NO: 8407 - RNA, 19 nt, Artificial Sequence
  Synthetic Oligonucleotide
gcucucauggaaugguuaa

SEQ ID NO: 8408 - RNA, 19 nt, Artificial Sequence
  Synthetic Oligonucleotide
gcucucauggaguggcuaa

SEQ ID NO: 8409 - RNA, 19 nt, Artificial Sequence
  Synthetic Oligonucleotide
guucucauggaauggcuaa

SEQ ID NO: 8410 - RNA, 19 nt, Artificial Sequence
  Synthetic Oligonucleotide
gcucucauggaguggcuga

SEQ ID NO: 8411 - RNA, 19 nt, Artificial Sequence
  Synthetic Oligonucleotide
gcucucacggaauggcuaa

SEQ ID NO: 8412 - RNA, 19 nt, Artificial Sequence
  Synthetic Oligonucleotide
gcucuaauggaauggcuaa

SEQ ID NO: 8413 - RNA, 19 nt, Artificial Sequence
  Synthetic Oligonucleotide
gcacucauggaauggcuaa

SEQ ID NO: 8414 - RNA, 19 nt, Artificial Sequence
  Synthetic Oligonucleotide
guucucacggaauggcuaa

SEQ ID NO: 8415 - RNA, 19 nt, Artificial Sequence
  Synthetic Oligonucleotide
cucucauggaauggcugaa

SEQ ID NO: 8416 - RNA, 19 nt, Artificial Sequence
  Synthetic Oligonucleotide
cucucauggaaugguuaaa

SEQ ID NO: 8417 - RNA, 19 nt, Artificial Sequence
  Synthetic Oligonucleotide
cucucauggaguggcuaaa

SEQ ID NO: 8418 - RNA, 19 nt, Artificial Sequence
  Synthetic Oligonucleotide
uucucauggaauggcuaaa

SEQ ID NO: 8419 - RNA, 19 nt, Artificial Sequence
  Synthetic Oligonucleotide
cucucauggaguggcugaa

SEQ ID NO: 8420 - RNA, 19 nt, Artificial Sequence
  Synthetic Oligonucleotide
cucucacggaauggcuaaa

SEQ ID NO: 8421 - RNA, 19 nt, Artificial Sequence
  Synthetic Oligonucleotide
cucuaauggaauggcuaaa

SEQ ID NO: 8422 - RNA, 19 nt, Artificial Sequence
  Synthetic Oligonucleotide
cacucauggaauggcuaaa

SEQ ID NO: 8423 - RNA, 19 nt, Artificial Sequence
  Synthetic Oligonucleotide
uucucacggaauggcuaaa

SEQ ID NO: 8424 - RNA, 19 nt, Artificial Sequence
  Synthetic Oligonucleotide
aacagcagagugcugugga

SEQ ID NO: 8425 - RNA, 19 nt, Artificial Sequence
  Synthetic Oligonucleotide
aacagcaggaugcugugga

SEQ ID NO: 8426 - RNA, 19 nt, Artificial Sequence
  Synthetic Oligonucleotide
agcagcagaaugcugugga

SEQ ID NO: 8427 - RNA, 19 nt, Artificial Sequence
  Synthetic Oligonucleotide
agcagcagagugcugugga

SEQ ID NO: 8428 - RNA, 19 nt, Artificial Sequence
  Synthetic Oligonucleotide
aacagcagaaugcugugaa

SEQ ID NO: 8429 - RNA, 19 nt, Artificial Sequence
  Synthetic Oligonucleotide
aacagcagaaugcuguaga

SEQ ID NO: 8430 - RNA, 19 nt, Artificial Sequence
  Synthetic Oligonucleotide
aacagcagaaugcugcgga

SEQ ID NO: 8431 - RNA, 19 nt, Artificial Sequence
  Synthetic Oligonucleotide
aacagcagaaugcugggga

SEQ ID NO: 8432 - RNA, 19 nt, Artificial Sequence
  Synthetic Oligonucleotide
aacagcagaaugcuaugga

SEQ ID NO: 8433 - RNA, 19 nt, Artificial Sequence
  Synthetic Oligonucleotide
aacagcagaaugcuuugga

SEQ ID NO: 8434 - RNA, 19 nt, Artificial Sequence
  Synthetic Oligonucleotide
aacagcagaaagcugugga

SEQ ID NO: 8435 - RNA, 19 nt, Artificial Sequence
  Synthetic Oligonucleotide
aacagcagaacgcugugga

SEQ ID NO: 8436 - RNA, 19 nt, Artificial Sequence
  Synthetic Oligonucleotide
aacagcaaaaugcugugga

SEQ ID NO: 8437 - RNA, 19 nt, Artificial Sequence
  Synthetic Oligonucleotide
aacagcauaaugcugugga

SEQ ID NO: 8438 - RNA, 19 nt, Artificial Sequence
  Synthetic Oligonucleotide
awcagcagaaugcugugga

SEQ ID NO: 8439 - RNA, 19 nt, Artificial Sequence
  Synthetic Oligonucleotide
aacagcagagugcuguaga

SEQ ID NO: 8440 - RNA, 19 nt, Artificial Sequence
  Synthetic Oligonucleotide
aacagcaaagugcugugga

SEQ ID NO: 8441 - RNA, 19 nt, Artificial Sequence
  Synthetic Oligonucleotide
gacagcaaaaugcugugga

SEQ ID NO: 8442 - RNA, 19 nt, Artificial Sequence
  Synthetic Oligonucleotide
aacagcagaguuaugugga

SEQ ID NO: 8443 - RNA, 19 nt, Artificial Sequence
  Synthetic Oligonucleotide
gaacagcagagugcugugg

SEQ ID NO: 8444 - RNA, 19 nt, Artificial Sequence
  Synthetic Oligonucleotide
gaacagcaggaugcugugg

SEQ ID NO: 8445 - RNA, 19 nt, Artificial Sequence
  Synthetic Oligonucleotide
gagcagcagaaugcugugg

SEQ ID NO: 8446 - RNA, 19 nt, Artificial Sequence
  Synthetic Oligonucleotide
gagcagcagagugcugugg

SEQ ID NO: 8447 - RNA, 19 nt, Artificial Sequence
  Synthetic Oligonucleotide
gaacagcagaaugcuguga

SEQ ID NO: 8448 - RNA, 19 nt, Artificial Sequence
  Synthetic Oligonucleotide
gaacagcagaaugcuguag

SEQ ID NO: 8449 - RNA, 19 nt, Artificial Sequence
  Synthetic Oligonucleotide
gaacagcagaaugcugcgg

SEQ ID NO: 8450 - RNA, 19 nt, Artificial Sequence
  Synthetic Oligonucleotide
gaacagcagaaugcugggg

SEQ ID NO: 8451 - RNA, 19 nt, Artificial Sequence
  Synthetic Oligonucleotide
gaacagcagaaugcuaugg

SEQ ID NO: 8452 - RNA, 19 nt, Artificial Sequence
  Synthetic Oligonucleotide
gaacagcagaaugcuuugg

SEQ ID NO: 8453 - RNA, 19 nt, Artificial Sequence
  Synthetic Oligonucleotide
gaacagcagaaagcugugg

SEQ ID NO: 8454 - RNA, 19 nt, Artificial Sequence
  Synthetic Oligonucleotide
gaacagcagaacgcugugg

SEQ ID NO: 8455 - RNA, 19 nt, Artificial Sequence
  Synthetic Oligonucleotide
gaacagcaaaaugcugugg

SEQ ID NO: 8456 - RNA, 19 nt, Artificial Sequence
  Synthetic Oligonucleotide
gaacagcauaaugcugugg

SEQ ID NO: 8457 - RNA, 19 nt, Artificial Sequence
  Synthetic Oligonucleotide
gawcagcagaaugcugugg

SEQ ID NO: 8458 - RNA, 19 nt, Artificial Sequence
  Synthetic Oligonucleotide
gaacagcagagugcuguag

SEQ ID NO: 8459 - RNA, 19 nt, Artificial Sequence
  Synthetic Oligonucleotide
gaacagcaaagugcugugg

SEQ ID NO: 8460 - RNA, 19 nt, Artificial Sequence
  Synthetic Oligonucleotide
ggacagcaaaaugcugugg

SEQ ID NO: 8461 - RNA, 19 nt, Artificial Sequence
  Synthetic Oligonucleotide
aaacagcagagugcugugg

SEQ ID NO: 8462 - RNA, 19 nt, Artificial Sequence
  Synthetic Oligonucleotide
gaacagcagaguuaugugg

SEQ ID NO: 8463 - RNA, 19 nt, Artificial Sequence
  Synthetic Oligonucleotide
ggcucucauggaauggcug

SEQ ID NO: 8464 - RNA, 19 nt, Artificial Sequence
  Synthetic Oligonucleotide
ggcucucauggaaugguua

SEQ ID NO: 8465 - RNA, 19 nt, Artificial Sequence
  Synthetic Oligonucleotide
ggcucucauggaguggcua

SEQ ID NO: 8466 - RNA, 19 nt, Artificial Sequence
  Synthetic Oligonucleotide
gguucucauggaauggcua

SEQ ID NO: 8467 - RNA, 19 nt, Artificial Sequence
  Synthetic Oligonucleotide
ggcucucauggaguggcug

SEQ ID NO: 8468 - RNA, 19 nt, Artificial Sequence
  Synthetic Oligonucleotide
ggcucucacggaauggcua

SEQ ID NO: 8469 - RNA, 19 nt, Artificial Sequence
  Synthetic Oligonucleotide
ggcucuaauggaauggcua

SEQ ID NO: 8470 - RNA, 19 nt, Artificial Sequence
  Synthetic Oligonucleotide
ggcacucauggaauggcua

SEQ ID NO: 8471 - RNA, 19 nt, Artificial Sequence
  Synthetic Oligonucleotide
agcucucauggaauggcua

SEQ ID NO: 8472 - RNA, 19 nt, Artificial Sequence
  Synthetic Oligonucleotide
ugcucucauggaauggcua

SEQ ID NO: 8473 - RNA, 19 nt, Artificial Sequence
  Synthetic Oligonucleotide
gguucucacggaauggcua

SEQ ID NO: 8474 - RNA, 19 nt, Artificial Sequence
  Synthetic Oligonucleotide
aggaacagcagagugcugu

SEQ ID NO: 8475 - RNA, 19 nt, Artificial Sequence
  Synthetic Oligonucleotide
aggaacagcaggaugcugu

SEQ ID NO: 8476 - RNA, 19 nt, Artificial Sequence
  Synthetic Oligonucleotide
aggagcagcagaaugcugu

SEQ ID NO: 8477 - RNA, 19 nt, Artificial Sequence
  Synthetic Oligonucleotide
gggaacagcagaaugcugu

SEQ ID NO: 8478 - RNA, 19 nt, Artificial Sequence
  Synthetic Oligonucleotide
aggagcagcagagugcugu

SEQ ID NO: 8479 - RNA, 19 nt, Artificial Sequence
  Synthetic Oligonucleotide
aggaacagcagaaugcugc

SEQ ID NO: 8480 - RNA, 19 nt, Artificial Sequence
  Synthetic Oligonucleotide
aggaacagcagaaugcugg

SEQ ID NO: 8481 - RNA, 19 nt, Artificial Sequence
  Synthetic Oligonucleotide
aggaacagcagaaugcuau

SEQ ID NO: 8482 - RNA, 19 nt, Artificial Sequence
  Synthetic Oligonucleotide
aggaacagcagaaugcuuu

SEQ ID NO: 8483 - RNA, 19 nt, Artificial Sequence
  Synthetic Oligonucleotide
aggaacagcagaaagcugu

SEQ ID NO: 8484 - RNA, 19 nt, Artificial Sequence
  Synthetic Oligonucleotide
aggaacagcagaacgcugu

SEQ ID NO: 8485 - RNA, 19 nt, Artificial Sequence
  Synthetic Oligonucleotide
aggaacagcaaaaugcugu

SEQ ID NO: 8486 - RNA, 19 nt, Artificial Sequence
  Synthetic Oligonucleotide
aggaacagcauaaugcugu

SEQ ID NO: 8487 - RNA, 19 nt, Artificial Sequence
  Synthetic Oligonucleotide
aggawcagcagaaugcugu

SEQ ID NO: 8488 - RNA, 19 nt, Artificial Sequence
  Synthetic Oligonucleotide
aagaacagcagaaugcugu

SEQ ID NO: 8489 - RNA, 19 nt, Artificial Sequence
  Synthetic Oligonucleotide
augaacagcagaaugcugu

SEQ ID NO: 8490 - RNA, 19 nt, Artificial Sequence
  Synthetic Oligonucleotide
aggaacagcaaagugcugu

SEQ ID NO: 8491 - RNA, 19 nt, Artificial Sequence
  Synthetic Oligonucleotide
agggacagcaaaaugcugu

SEQ ID NO: 8492 - RNA, 19 nt, Artificial Sequence
  Synthetic Oligonucleotide
agaaacagcagagugcugu

SEQ ID NO: 8493 - RNA, 19 nt, Artificial Sequence
  Synthetic Oligonucleotide
augaacagcagagugcugu

SEQ ID NO: 8494 - RNA, 19 nt, Artificial Sequence
  Synthetic Oligonucleotide
aggaacagcagaguuaugu

SEQ ID NO: 8495 - RNA, 19 nt, Artificial Sequence
  Synthetic Oligonucleotide
ucuugaggcucucauggag

SEQ ID NO: 8496 - RNA, 19 nt, Artificial Sequence
  Synthetic Oligonucleotide
ucuugagguucucauggaa

SEQ ID NO: 8497 - RNA, 19 nt, Artificial Sequence
  Synthetic Oligonucleotide
ucuugaggcucucacggaa

SEQ ID NO: 8498 - RNA, 19 nt, Artificial Sequence
  Synthetic Oligonucleotide
ucuugaggcucuaauggaa

SEQ ID NO: 8499 - RNA, 19 nt, Artificial Sequence
  Synthetic Oligonucleotide
ucuugaggcacucauggaa

SEQ ID NO: 8500 - RNA, 19 nt, Artificial Sequence
  Synthetic Oligonucleotide
ucuugaagcucucauggaa

SEQ ID NO: 8501 - RNA, 19 nt, Artificial Sequence
  Synthetic Oligonucleotide
ucuugaugcucucauggaa

SEQ ID NO: 8502 - RNA, 19 nt, Artificial Sequence
  Synthetic Oligonucleotide
ucuagaggcucucauggaa

SEQ ID NO: 8503 - RNA, 19 nt, Artificial Sequence
  Synthetic Oligonucleotide
ucucgaggcucucauggaa

SEQ ID NO: 8504 - RNA, 19 nt, Artificial Sequence
  Synthetic Oligonucleotide
ccuugaggcucucauggaa

SEQ ID NO: 8505 - RNA, 19 nt, Artificial Sequence
  Synthetic Oligonucleotide
ucuugagguucucacggaa

SEQ ID NO: 8506 - RNA, 19 nt, Artificial Sequence
  Synthetic Oligonucleotide
ucuagaggcucucauggag

SEQ ID NO: 8507 - RNA, 19 nt, Artificial Sequence
  Synthetic Oligonucleotide
ucucgaggcucucauggag

SEQ ID NO: 8508 - RNA, 19 nt, Artificial Sequence
  Synthetic Oligonucleotide
ccuugaggcucucauggag

SEQ ID NO: 8509 - RNA, 19 nt, Artificial Sequence
  Synthetic Oligonucleotide
ucucgaggcacucauggaa

SEQ ID NO: 8510 - RNA, 19 nt, Artificial Sequence
  Synthetic Oligonucleotide
ggaacagcagagugcugug

SEQ ID NO: 8511 - RNA, 19 nt, Artificial Sequence
  Synthetic Oligonucleotide
ggaacagcaggaugcugug

SEQ ID NO: 8512 - RNA, 19 nt, Artificial Sequence
  Synthetic Oligonucleotide
ggagcagcagaaugcugug

SEQ ID NO: 8513 - RNA, 19 nt, Artificial Sequence
  Synthetic Oligonucleotide
ggagcagcagagugcugug

SEQ ID NO: 8514 - RNA, 19 nt, Artificial Sequence
  Synthetic Oligonucleotide
ggaacagcagaaugcugua

SEQ ID NO: 8515 - RNA, 19 nt, Artificial Sequence
  Synthetic Oligonucleotide
ggaacagcagaaugcugcg

SEQ ID NO: 8516 - RNA, 19 nt, Artificial Sequence
  Synthetic Oligonucleotide
ggaacagcagaaugcuggg

SEQ ID NO: 8517 - RNA, 19 nt, Artificial Sequence
  Synthetic Oligonucleotide
ggaacagcagaaugcuaug

SEQ ID NO: 8518 - RNA, 19 nt, Artificial Sequence
  Synthetic Oligonucleotide
ggaacagcagaaugcuuug

SEQ ID NO: 8519 - RNA, 19 nt, Artificial Sequence
  Synthetic Oligonucleotide
ggaacagcagaaagcugug

SEQ ID NO: 8520 - RNA, 19 nt, Artificial Sequence
  Synthetic Oligonucleotide
ggaacagcagaacgcugug

SEQ ID NO: 8521 - RNA, 19 nt, Artificial Sequence
  Synthetic Oligonucleotide
ggaacagcaaaaugcugug

SEQ ID NO: 8522 - RNA, 19 nt, Artificial Sequence
  Synthetic Oligonucleotide
ggaacagcauaaugcugug

SEQ ID NO: 8523 - RNA, 19 nt, Artificial Sequence
  Synthetic Oligonucleotide
ggawcagcagaaugcugug

SEQ ID NO: 8524 - RNA, 19 nt, Artificial Sequence
  Synthetic Oligonucleotide
agaacagcagaaugcugug

SEQ ID NO: 8525 - RNA, 19 nt, Artificial Sequence
  Synthetic Oligonucleotide
ugaacagcagaaugcugug

SEQ ID NO: 8526 - RNA, 19 nt, Artificial Sequence
  Synthetic Oligonucleotide
ggaacagcagagugcugua

SEQ ID NO: 8527 - RNA, 19 nt, Artificial Sequence
  Synthetic Oligonucleotide
ggaacagcaaagugcugug

SEQ ID NO: 8528 - RNA, 19 nt, Artificial Sequence
  Synthetic Oligonucleotide
gggacagcaaaaugcugug

SEQ ID NO: 8529 - RNA, 19 nt, Artificial Sequence
  Synthetic Oligonucleotide
gaaacagcagagugcugug

SEQ ID NO: 8530 - RNA, 19 nt, Artificial Sequence
  Synthetic Oligonucleotide
ugaacagcagagugcugug

SEQ ID NO: 8531 - RNA, 19 nt, Artificial Sequence
  Synthetic Oligonucleotide
ggaacagcagaguuaugug

SEQ ID NO: 8532 - RNA, 19 nt, Artificial Sequence
  Synthetic Oligonucleotide
ucuuuuugaaaauuugcag

SEQ ID NO: 8533 - RNA, 19 nt, Artificial Sequence
  Synthetic Oligonucleotide
ucuucuugaaaauuuacag

SEQ ID NO: 8534 - RNA, 19 nt, Artificial Sequence
  Synthetic Oligonucleotide
ucuucuugaaaaauugcag

SEQ ID NO: 8535 - RNA, 19 nt, Artificial Sequence
  Synthetic Oligonucleotide
ucuucuugaaaacuugcag

SEQ ID NO: 8536 - RNA, 19 nt, Artificial Sequence
  Synthetic Oligonucleotide
ucuucucgaaaauuugcag

SEQ ID NO: 8537 - RNA, 19 nt, Artificial Sequence
  Synthetic Oligonucleotide
ucuuauugaaaauuugcag

SEQ ID NO: 8538 - RNA, 19 nt, Artificial Sequence
  Synthetic Oligonucleotide
ucuccuugaaaauuugcag

SEQ ID NO: 8539 - RNA, 19 nt, Artificial Sequence
  Synthetic Oligonucleotide
ccuucuugaaaauuugcag

SEQ ID NO: 8540 - RNA, 19 nt, Artificial Sequence
  Synthetic Oligonucleotide
ucuccuugaaaauuuacag

SEQ ID NO: 8541 - RNA, 19 nt, Artificial Sequence
  Synthetic Oligonucleotide
ucuccuugauaauuugcag

SEQ ID NO: 8542 - RNA, 19 nt, Artificial Sequence
  Synthetic Oligonucleotide
ucucauugaaaauuugcag

SEQ ID NO: 8543 - RNA, 19 nt, Artificial Sequence
  Synthetic Oligonucleotide
aucuuuuugaaaauuugca

SEQ ID NO: 8544 - RNA, 19 nt, Artificial Sequence
  Synthetic Oligonucleotide
aucuucuugaaaauuuaca

SEQ ID NO: 8545 - RNA, 19 nt, Artificial Sequence
  Synthetic Oligonucleotide
aucuucuugaaaaauugca

SEQ ID NO: 8546 - RNA, 19 nt, Artificial Sequence
  Synthetic Oligonucleotide
aucuucuugaaaacuugca

SEQ ID NO: 8547 - RNA, 19 nt, Artificial Sequence
  Synthetic Oligonucleotide
aucuucucgaaaauuugca

SEQ ID NO: 8548 - RNA, 19 nt, Artificial Sequence
  Synthetic Oligonucleotide
aucuuauugaaaauuugca

SEQ ID NO: 8549 - RNA, 19 nt, Artificial Sequence
  Synthetic Oligonucleotide
aucuccuugaaaauuugca

SEQ ID NO: 8550 - RNA, 19 nt, Artificial Sequence
  Synthetic Oligonucleotide
accuucuugaaaauuugca

SEQ ID NO: 8551 - RNA, 19 nt, Artificial Sequence
  Synthetic Oligonucleotide
aucuccuugaaaauuuaca

SEQ ID NO: 8552 - RNA, 19 nt, Artificial Sequence
  Synthetic Oligonucleotide
aucuccuugauaauuugca

SEQ ID NO: 8553 - RNA, 19 nt, Artificial Sequence
  Synthetic Oligonucleotide
aucucauugaaaauuugca

SEQ ID NO: 8554 - RNA, 19 nt, Artificial Sequence
  Synthetic Oligonucleotide
acagcagagugcuguggau

SEQ ID NO: 8555 - RNA, 19 nt, Artificial Sequence
  Synthetic Oligonucleotide
acagcaggaugcuguggau

SEQ ID NO: 8556 - RNA, 19 nt, Artificial Sequence
  Synthetic Oligonucleotide
gcagcagaaugcuguggau

SEQ ID NO: 8557 - RNA, 19 nt, Artificial Sequence
  Synthetic Oligonucleotide
gcagcagagugcuguggau

SEQ ID NO: 8558 - RNA, 19 nt, Artificial Sequence
  Synthetic Oligonucleotide
acagcagaaugcuguggaa

SEQ ID NO: 8559 - RNA, 19 nt, Artificial Sequence
  Synthetic Oligonucleotide
acagcagaaugcuguggac

SEQ ID NO: 8560 - RNA, 19 nt, Artificial Sequence
  Synthetic Oligonucleotide
acagcagaaugcuguggag

SEQ ID NO: 8561 - RNA, 19 nt, Artificial Sequence
  Synthetic Oligonucleotide
acagcagaaugcugugaau

SEQ ID NO: 8562 - RNA, 19 nt, Artificial Sequence
  Synthetic Oligonucleotide
acagcagaaugcuguagau

SEQ ID NO: 8563 - RNA, 19 nt, Artificial Sequence
  Synthetic Oligonucleotide
acagcagaaugcugcggau

SEQ ID NO: 8564 - RNA, 19 nt, Artificial Sequence
  Synthetic Oligonucleotide
acagcagaaugcuggggau

SEQ ID NO: 8565 - RNA, 19 nt, Artificial Sequence
  Synthetic Oligonucleotide
acagcagaaugcuauggau

SEQ ID NO: 8566 - RNA, 19 nt, Artificial Sequence
  Synthetic Oligonucleotide
acagcagaaugcuuuggau

SEQ ID NO: 8567 - RNA, 19 nt, Artificial Sequence
  Synthetic Oligonucleotide
acagcagaaagcuguggau

SEQ ID NO: 8568 - RNA, 19 nt, Artificial Sequence
  Synthetic Oligonucleotide
acagcagaacgcuguggau

SEQ ID NO: 8569 - RNA, 19 nt, Artificial Sequence
  Synthetic Oligonucleotide
acagcaaaaugcuguggau

SEQ ID NO: 8570 - RNA, 19 nt, Artificial Sequence
  Synthetic Oligonucleotide
acagcauaaugcuguggau

SEQ ID NO: 8571 - RNA, 19 nt, Artificial Sequence
  Synthetic Oligonucleotide
wcagcagaaugcuguggau

SEQ ID NO: 8572 - RNA, 19 nt, Artificial Sequence
  Synthetic Oligonucleotide
acagcagagugcuguagau

SEQ ID NO: 8573 - RNA, 19 nt, Artificial Sequence
  Synthetic Oligonucleotide
acagcaaagugcuguggau

SEQ ID NO: 8574 - RNA, 19 nt, Artificial Sequence
  Synthetic Oligonucleotide
acagcagaguuauguggau

SEQ ID NO: 8575 - RNA, 19 nt, Artificial Sequence
  Synthetic Oligonucleotide
augggggugcagaugcagc

SEQ ID NO: 8576 - RNA, 19 nt, Artificial Sequence
  Synthetic Oligonucleotide
augggggugcaggugcaac

SEQ ID NO: 8577 - RNA, 19 nt, Artificial Sequence
  Synthetic Oligonucleotide
augggggugcagauacaac

SEQ ID NO: 8578 - RNA, 19 nt, Artificial Sequence
  Synthetic Oligonucleotide
augggggugcagauucaac

SEQ ID NO: 8579 - RNA, 19 nt, Artificial Sequence
  Synthetic Oligonucleotide
augggggugcaaaugcaac

SEQ ID NO: 8580 - RNA, 19 nt, Artificial Sequence
  Synthetic Oligonucleotide
augggguugcagaugcaac

SEQ ID NO: 8581 - RNA, 19 nt, Artificial Sequence
  Synthetic Oligonucleotide
augggagugcagaugcaac

SEQ ID NO: 8582 - RNA, 19 nt, Artificial Sequence
  Synthetic Oligonucleotide
augggagugcagaugcagc

SEQ ID NO: 8583 - RNA, 19 nt, Artificial Sequence
  Synthetic Oligonucleotide
augggagugcaaaugcaac

SEQ ID NO: 8584 - RNA, 19 nt, Artificial Sequence
  Synthetic Oligonucleotide
augggaguacagaugcaac

SEQ ID NO: 8585 - RNA, 19 nt, Artificial Sequence
  Synthetic Oligonucleotide
augggagugcagauacagc

SEQ ID NO: 8586 - RNA, 19 nt, Artificial Sequence
  Synthetic Oligonucleotide
augggagugcaaaugcagc

SEQ ID NO: 8587 - RNA, 19 nt, Artificial Sequence
  Synthetic Oligonucleotide
augggaguacagaugcagc

SEQ ID NO: 8588 - RNA, 19 nt, Artificial Sequence
  Synthetic Oligonucleotide
augggagugcaaaugcauc

SEQ ID NO: 8589 - RNA, 19 nt, Artificial Sequence
  Synthetic Oligonucleotide
ugggggugcagaugcagcg

SEQ ID NO: 8590 - RNA, 19 nt, Artificial Sequence
  Synthetic Oligonucleotide
ugggggugcaggugcaacg

SEQ ID NO: 8591 - RNA, 19 nt, Artificial Sequence
  Synthetic Oligonucleotide
ugggggugcagauacaacg

SEQ ID NO: 8592 - RNA, 19 nt, Artificial Sequence
  Synthetic Oligonucleotide
ugggggugcagauucaacg

SEQ ID NO: 8593 - RNA, 19 nt, Artificial Sequence
  Synthetic Oligonucleotide
ugggggugcaaaugcaacg

SEQ ID NO: 8594 - RNA, 19 nt, Artificial Sequence
  Synthetic Oligonucleotide
ugggguugcagaugcaacg

SEQ ID NO: 8595 - RNA, 19 nt, Artificial Sequence
  Synthetic Oligonucleotide
ugggagugcagaugcaacg

SEQ ID NO: 8596 - RNA, 19 nt, Artificial Sequence
  Synthetic Oligonucleotide
ugggagugcagaugcagcg

SEQ ID NO: 8597 - RNA, 19 nt, Artificial Sequence
  Synthetic Oligonucleotide
ugggagugcaaaugcaacg

SEQ ID NO: 8598 - RNA, 19 nt, Artificial Sequence
  Synthetic Oligonucleotide
ugggaguacagaugcaacg

SEQ ID NO: 8599 - RNA, 19 nt, Artificial Sequence
  Synthetic Oligonucleotide
ugggagugcagauacagcg

SEQ ID NO: 8600 - RNA, 19 nt, Artificial Sequence
  Synthetic Oligonucleotide
ugggagugcaaaugcagcg

SEQ ID NO: 8601 - RNA, 19 nt, Artificial Sequence
  Synthetic Oligonucleotide
ugggaguacagaugcagcg

SEQ ID NO: 8602 - RNA, 19 nt, Artificial Sequence
  Synthetic Oligonucleotide
ugggagugcaaaugcaucg

SEQ ID NO: 8603 - RNA, 19 nt, Artificial Sequence
  Synthetic Oligonucleotide
ccuaucagaaacggauggg

SEQ ID NO: 8604 - RNA, 19 nt, Artificial Sequence
  Synthetic Oligonucleotide
ccuaucagaagcgaauggg

SEQ ID NO: 8605 - RNA, 19 nt, Artificial Sequence
  Synthetic Oligonucleotide
ccuaucagagacgaauggg

SEQ ID NO: 8606 - RNA, 19 nt, Artificial Sequence
  Synthetic Oligonucleotide
cuuaucagaagcgaauggg

SEQ ID NO: 8607 - RNA, 19 nt, Artificial Sequence
  Synthetic Oligonucleotide
ccuaucagaaaagaauggg

SEQ ID NO: 8608 - RNA, 19 nt, Artificial Sequence
  Synthetic Oligonucleotide
ccuaucaaaaacgaauggg

SEQ ID NO: 8609 - RNA, 19 nt, Artificial Sequence
  Synthetic Oligonucleotide
ccuaccagaaacgaauggg

SEQ ID NO: 8610 - RNA, 19 nt, Artificial Sequence
  Synthetic Oligonucleotide
ccuaucaaaagcgaauggg

SEQ ID NO: 8611 - RNA, 19 nt, Artificial Sequence
  Synthetic Oligonucleotide
ccuaccagaaacggauggg

SEQ ID NO: 8612 - RNA, 19 nt, Artificial Sequence
  Synthetic Oligonucleotide
cuuaccagaaacggauggg

SEQ ID NO: 8613 - RNA, 19 nt, Artificial Sequence
  Synthetic Oligonucleotide
ccuaccaaaaacgaauggg

SEQ ID NO: 8614 - RNA, 19 nt, Artificial Sequence
  Synthetic Oligonucleotide
cauaccagaaacgaauggg

SEQ ID NO: 8615 - RNA, 19 nt, Artificial Sequence
  Synthetic Oligonucleotide
uugaauggaaugauaauac

SEQ ID NO: 8616 - RNA, 19 nt, Artificial Sequence
  Synthetic Oligonucleotide
uugaauggaaugguaacac

SEQ ID NO: 8617 - RNA, 19 nt, Artificial Sequence
  Synthetic Oligonucleotide
uugaauggagugauaacac

SEQ ID NO: 8618 - RNA, 19 nt, Artificial Sequence
  Synthetic Oligonucleotide
uugaguggaaugauaacac

SEQ ID NO: 8619 - RNA, 19 nt, Artificial Sequence
  Synthetic Oligonucleotide
uugaguggaaugguaacac

SEQ ID NO: 8620 - RNA, 19 nt, Artificial Sequence
  Synthetic Oligonucleotide
uugaauggaaugauaawac

SEQ ID NO: 8621 - RNA, 19 nt, Artificial Sequence
  Synthetic Oligonucleotide
uugaauggaaugacaacac

SEQ ID NO: 8622 - RNA, 19 nt, Artificial Sequence
  Synthetic Oligonucleotide
uugaauggaauaauaacac

SEQ ID NO: 8623 - RNA, 19 nt, Artificial Sequence
  Synthetic Oligonucleotide
wugaauggaaugauaacac

SEQ ID NO: 8624 - RNA, 19 nt, Artificial Sequence
  Synthetic Oligonucleotide
gaauggaaugauaacacgg

SEQ ID NO: 8625 - RNA, 19 nt, Artificial Sequence
  Synthetic Oligonucleotide
gaauggaaugauaauacag

SEQ ID NO: 8626 - RNA, 19 nt, Artificial Sequence
  Synthetic Oligonucleotide
gaauggaaugguaacacag

SEQ ID NO: 8627 - RNA, 19 nt, Artificial Sequence
  Synthetic Oligonucleotide
gaauggagugauaacacag

SEQ ID NO: 8628 - RNA, 19 nt, Artificial Sequence
  Synthetic Oligonucleotide
gaguggaaugauaacacag

SEQ ID NO: 8629 - RNA, 19 nt, Artificial Sequence
  Synthetic Oligonucleotide
gaauggaaugguaacacgg

SEQ ID NO: 8630 - RNA, 19 nt, Artificial Sequence
  Synthetic Oligonucleotide
gaguggaaugguaacacgg

SEQ ID NO: 8631 - RNA, 19 nt, Artificial Sequence
  Synthetic Oligonucleotide
gaauggaaugauaawacag

SEQ ID NO: 8632 - RNA, 19 nt, Artificial Sequence
  Synthetic Oligonucleotide
gaauggaaugacaacacag

SEQ ID NO: 8633 - RNA, 19 nt, Artificial Sequence
  Synthetic Oligonucleotide
gaauggaauaauaacacag

SEQ ID NO: 8634 - RNA, 19 nt, Artificial Sequence
  Synthetic Oligonucleotide
gaauggagugauaacacug

SEQ ID NO: 8635 - RNA, 19 nt, Artificial Sequence
  Synthetic Oligonucleotide
ugaauggaaugauaacacg

SEQ ID NO: 8636 - RNA, 19 nt, Artificial Sequence
  Synthetic Oligonucleotide
ugaauggaaugauaauaca

SEQ ID NO: 8637 - RNA, 19 nt, Artificial Sequence
  Synthetic Oligonucleotide
ugaauggaaugguaacaca

SEQ ID NO: 8638 - RNA, 19 nt, Artificial Sequence
  Synthetic Oligonucleotide
ugaauggagugauaacaca

SEQ ID NO: 8639 - RNA, 19 nt, Artificial Sequence
  Synthetic Oligonucleotide
ugaguggaaugauaacaca

SEQ ID NO: 8640 - RNA, 19 nt, Artificial Sequence
  Synthetic Oligonucleotide
ugaauggaaugguaacacg

SEQ ID NO: 8641 - RNA, 19 nt, Artificial Sequence
  Synthetic Oligonucleotide
ugaguggaaugguaacacg

SEQ ID NO: 8642 - RNA, 19 nt, Artificial Sequence
  Synthetic Oligonucleotide
ugaauggaaugauaawaca

SEQ ID NO: 8643 - RNA, 19 nt, Artificial Sequence
  Synthetic Oligonucleotide
ugaauggaaugacaacaca

SEQ ID NO: 8644 - RNA, 19 nt, Artificial Sequence
  Synthetic Oligonucleotide
ugaauggaauaauaacaca

SEQ ID NO: 8645 - RNA, 19 nt, Artificial Sequence
  Synthetic Oligonucleotide
ugaauggagugauaacacu

SEQ ID NO: 8646 - RNA, 19 nt, Artificial Sequence
  Synthetic Oligonucleotide
uggaaugauaacacgguuc

SEQ ID NO: 8647 - RNA, 19 nt, Artificial Sequence
  Synthetic Oligonucleotide
uggaaugauaauacaguuc

SEQ ID NO: 8648 - RNA, 19 nt, Artificial Sequence
  Synthetic Oligonucleotide
uggaaugguaacacaguuc

SEQ ID NO: 8649 - RNA, 19 nt, Artificial Sequence
  Synthetic Oligonucleotide
uggagugauaacacaguuc

SEQ ID NO: 8650 - RNA, 19 nt, Artificial Sequence
  Synthetic Oligonucleotide
uggaaugguaacacgguuc

SEQ ID NO: 8651 - RNA, 19 nt, Artificial Sequence
  Synthetic Oligonucleotide
uggaaugauaacacaguua

SEQ ID NO: 8652 - RNA, 19 nt, Artificial Sequence
  Synthetic Oligonucleotide
uggaaugauaacacagcuc

SEQ ID NO: 8653 - RNA, 19 nt, Artificial Sequence
  Synthetic Oligonucleotide
uggaaugauaawacaguuc

SEQ ID NO: 8654 - RNA, 19 nt, Artificial Sequence
  Synthetic Oligonucleotide
uggaaugacaacacaguuc

SEQ ID NO: 8655 - RNA, 19 nt, Artificial Sequence
  Synthetic Oligonucleotide
uggaauaauaacacaguuc

SEQ ID NO: 8656 - RNA, 19 nt, Artificial Sequence
  Synthetic Oligonucleotide
uggagugauaacacuguuc

SEQ ID NO: 8657 - RNA, 19 nt, Artificial Sequence
  Synthetic Oligonucleotide
auggaaugauaacacgguu

SEQ ID NO: 8658 - RNA, 19 nt, Artificial Sequence
  Synthetic Oligonucleotide
auggaaugauaauacaguu

SEQ ID NO: 8659 - RNA, 19 nt, Artificial Sequence
  Synthetic Oligonucleotide
auggaaugguaacacaguu

SEQ ID NO: 8660 - RNA, 19 nt, Artificial Sequence
  Synthetic Oligonucleotide
auggagugauaacacaguu

SEQ ID NO: 8661 - RNA, 19 nt, Artificial Sequence
  Synthetic Oligonucleotide
guggaaugauaacacaguu

SEQ ID NO: 8662 - RNA, 19 nt, Artificial Sequence
  Synthetic Oligonucleotide
auggaaugguaacacgguu

SEQ ID NO: 8663 - RNA, 19 nt, Artificial Sequence
  Synthetic Oligonucleotide
guggaaugguaacacgguu

SEQ ID NO: 8664 - RNA, 19 nt, Artificial Sequence
  Synthetic Oligonucleotide
auggaaugauaacacagcu

SEQ ID NO: 8665 - RNA, 19 nt, Artificial Sequence
  Synthetic Oligonucleotide
auggaaugauaawacaguu

SEQ ID NO: 8666 - RNA, 19 nt, Artificial Sequence
  Synthetic Oligonucleotide
auggaaugacaacacaguu

SEQ ID NO: 8667 - RNA, 19 nt, Artificial Sequence
  Synthetic Oligonucleotide
auggaauaauaacacaguu

SEQ ID NO: 8668 - RNA, 19 nt, Artificial Sequence
  Synthetic Oligonucleotide
auggagugauaacacuguu

SEQ ID NO: 8669 - RNA, 19 nt, Artificial Sequence
  Synthetic Oligonucleotide
aauggaaugauaacacggu

SEQ ID NO: 8670 - RNA, 19 nt, Artificial Sequence
  Synthetic Oligonucleotide
aauggaaugauaauacagu

SEQ ID NO: 8671 - RNA, 19 nt, Artificial Sequence
  Synthetic Oligonucleotide
aauggaaugguaacacagu

SEQ ID NO: 8672 - RNA, 19 nt, Artificial Sequence
  Synthetic Oligonucleotide
aauggagugauaacacagu

SEQ ID NO: 8673 - RNA, 19 nt, Artificial Sequence
  Synthetic Oligonucleotide
aguggaaugauaacacagu

SEQ ID NO: 8674 - RNA, 19 nt, Artificial Sequence
  Synthetic Oligonucleotide
aauggaaugguaacacggu

SEQ ID NO: 8675 - RNA, 19 nt, Artificial Sequence
  Synthetic Oligonucleotide
aguggaaugguaacacggu

SEQ ID NO: 8676 - RNA, 19 nt, Artificial Sequence
  Synthetic Oligonucleotide
aauggaaugauaacacagc

SEQ ID NO: 8677 - RNA, 19 nt, Artificial Sequence
  Synthetic Oligonucleotide
aauggaaugauaawacagu

SEQ ID NO: 8678 - RNA, 19 nt, Artificial Sequence
  Synthetic Oligonucleotide
aauggaaugacaacacagu

SEQ ID NO: 8679 - RNA, 19 nt, Artificial Sequence
  Synthetic Oligonucleotide
aauggaauaauaacacagu

SEQ ID NO: 8680 - RNA, 19 nt, Artificial Sequence
  Synthetic Oligonucleotide
aauggagugauaacacugu

SEQ ID NO: 8681 - RNA, 19 nt, Artificial Sequence
  Synthetic Oligonucleotide
cuugaauggaaugauaaua

SEQ ID NO: 8682 - RNA, 19 nt, Artificial Sequence
  Synthetic Oligonucleotide
cuugaauggaaugguaaca

SEQ ID NO: 8683 - RNA, 19 nt, Artificial Sequence
  Synthetic Oligonucleotide
cuugaauggagugauaaca

SEQ ID NO: 8684 - RNA, 19 nt, Artificial Sequence
  Synthetic Oligonucleotide
cuugaguggaaugauaaca

SEQ ID NO: 8685 - RNA, 19 nt, Artificial Sequence
  Synthetic Oligonucleotide
uuugaauggaaugauaaca

SEQ ID NO: 8686 - RNA, 19 nt, Artificial Sequence
  Synthetic Oligonucleotide
cuugaguggaaugguaaca

SEQ ID NO: 8687 - RNA, 19 nt, Artificial Sequence
  Synthetic Oligonucleotide
cuugaauggaaugauaawa

SEQ ID NO: 8688 - RNA, 19 nt, Artificial Sequence
  Synthetic Oligonucleotide
cuugaauggaaugacaaca

SEQ ID NO: 8689 - RNA, 19 nt, Artificial Sequence
  Synthetic Oligonucleotide
cuugaauggaauaauaaca

SEQ ID NO: 8690 - RNA, 19 nt, Artificial Sequence
  Synthetic Oligonucleotide
auugaauggaaugauaaca

SEQ ID NO: 8691 - RNA, 19 nt, Artificial Sequence
  Synthetic Oligonucleotide
wwugaauggaaugauaaca

SEQ ID NO: 8692 - RNA, 19 nt, Artificial Sequence
  Synthetic Oligonucleotide
ugauaacacaguucggguc

SEQ ID NO: 8693 - RNA, 19 nt, Artificial Sequence
  Synthetic Oligonucleotide
ugauaacacgguucgaguc

SEQ ID NO: 8694 - RNA, 19 nt, Artificial Sequence
  Synthetic Oligonucleotide
ugauaauacaguucgaguc

SEQ ID NO: 8695 - RNA, 19 nt, Artificial Sequence
  Synthetic Oligonucleotide
ugguaacacaguucgaguc

SEQ ID NO: 8696 - RNA, 19 nt, Artificial Sequence
  Synthetic Oligonucleotide
ugguaacacgguucgaguc

SEQ ID NO: 8697 - RNA, 19 nt, Artificial Sequence
  Synthetic Oligonucleotide
ugauaacacaguucgagua

SEQ ID NO: 8698 - RNA, 19 nt, Artificial Sequence
  Synthetic Oligonucleotide
ugauaacacaguucgaauc

SEQ ID NO: 8699 - RNA, 19 nt, Artificial Sequence
  Synthetic Oligonucleotide
ugauaacacaguucaaguc

SEQ ID NO: 8700 - RNA, 19 nt, Artificial Sequence
  Synthetic Oligonucleotide
ugauaacacaguuagaguc

SEQ ID NO: 8701 - RNA, 19 nt, Artificial Sequence
  Synthetic Oligonucleotide
ugauaacacagcucgaguc

SEQ ID NO: 8702 - RNA, 19 nt, Artificial Sequence
  Synthetic Oligonucleotide
ugauaacacuguucgaguc

SEQ ID NO: 8703 - RNA, 19 nt, Artificial Sequence
  Synthetic Oligonucleotide
ugauaawacaguucgaguc

SEQ ID NO: 8704 - RNA, 19 nt, Artificial Sequence
  Synthetic Oligonucleotide
ugacaacacaguucgaguc

SEQ ID NO: 8705 - RNA, 19 nt, Artificial Sequence
  Synthetic Oligonucleotide
uaauaacacaguucgaguc

SEQ ID NO: 8706 - RNA, 19 nt, Artificial Sequence
  Synthetic Oligonucleotide
ugguaacacgguucgaggc

SEQ ID NO: 8707 - RNA, 19 nt, Artificial Sequence
  Synthetic Oligonucleotide
ggaaugauaacacgguucg

SEQ ID NO: 8708 - RNA, 19 nt, Artificial Sequence
  Synthetic Oligonucleotide
ggaaugauaauacaguucg

SEQ ID NO: 8709 - RNA, 19 nt, Artificial Sequence
  Synthetic Oligonucleotide
ggaaugguaacacaguucg

SEQ ID NO: 8710 - RNA, 19 nt, Artificial Sequence
  Synthetic Oligonucleotide
ggagugauaacacaguucg

SEQ ID NO: 8711 - RNA, 19 nt, Artificial Sequence
  Synthetic Oligonucleotide
ggaaugguaacacgguucg

SEQ ID NO: 8712 - RNA, 19 nt, Artificial Sequence
  Synthetic Oligonucleotide
ggaaugauaacacaguuca

SEQ ID NO: 8713 - RNA, 19 nt, Artificial Sequence
  Synthetic Oligonucleotide
ggaaugauaacacaguuag

SEQ ID NO: 8714 - RNA, 19 nt, Artificial Sequence
  Synthetic Oligonucleotide
ggaaugauaacacagcucg

SEQ ID NO: 8715 - RNA, 19 nt, Artificial Sequence
  Synthetic Oligonucleotide
ggaaugauaawacaguucg

SEQ ID NO: 8716 - RNA, 19 nt, Artificial Sequence
  Synthetic Oligonucleotide
ggaaugacaacacaguucg

SEQ ID NO: 8717 - RNA, 19 nt, Artificial Sequence
  Synthetic Oligonucleotide
ggaauaauaacacaguucg

SEQ ID NO: 8718 - RNA, 19 nt, Artificial Sequence
  Synthetic Oligonucleotide
ggagugauaacacuguucg

SEQ ID NO: 8719 - RNA, 19 nt, Artificial Sequence
  Synthetic Oligonucleotide
gaaugauaacacaguucgg

SEQ ID NO: 8720 - RNA, 19 nt, Artificial Sequence
  Synthetic Oligonucleotide
gaaugauaacacgguucga

SEQ ID NO: 8721 - RNA, 19 nt, Artificial Sequence
  Synthetic Oligonucleotide
gaaugauaauacaguucga

SEQ ID NO: 8722 - RNA, 19 nt, Artificial Sequence
  Synthetic Oligonucleotide
gaaugguaacacaguucga

SEQ ID NO: 8723 - RNA, 19 nt, Artificial Sequence
  Synthetic Oligonucleotide
gagugauaacacaguucga

SEQ ID NO: 8724 - RNA, 19 nt, Artificial Sequence
  Synthetic Oligonucleotide
gaaugguaacacgguucga

SEQ ID NO: 8725 - RNA, 19 nt, Artificial Sequence
  Synthetic Oligonucleotide
gaaugauaacacaguucaa

SEQ ID NO: 8726 - RNA, 19 nt, Artificial Sequence
  Synthetic Oligonucleotide
gaaugauaacacaguuaga

SEQ ID NO: 8727 - RNA, 19 nt, Artificial Sequence
  Synthetic Oligonucleotide
gaaugauaacacagcucga

SEQ ID NO: 8728 - RNA, 19 nt, Artificial Sequence
  Synthetic Oligonucleotide
gaaugauaawacaguucga

SEQ ID NO: 8729 - RNA, 19 nt, Artificial Sequence
  Synthetic Oligonucleotide
gaaugacaacacaguucga

SEQ ID NO: 8730 - RNA, 19 nt, Artificial Sequence
  Synthetic Oligonucleotide
gaauaauaacacaguucga

SEQ ID NO: 8731 - RNA, 19 nt, Artificial Sequence
  Synthetic Oligonucleotide
gagugauaacacuguucga

SEQ ID NO: 8732 - RNA, 19 nt, Artificial Sequence
  Synthetic Oligonucleotide
augauaacacaguucgggu

SEQ ID NO: 8733 - RNA, 19 nt, Artificial Sequence
  Synthetic Oligonucleotide
augauaacacgguucgagu

SEQ ID NO: 8734 - RNA, 19 nt, Artificial Sequence
  Synthetic Oligonucleotide
augauaauacaguucgagu

SEQ ID NO: 8735 - RNA, 19 nt, Artificial Sequence
  Synthetic Oligonucleotide
augguaacacaguucgagu

SEQ ID NO: 8736 - RNA, 19 nt, Artificial Sequence
  Synthetic Oligonucleotide
gugauaacacaguucgagu

SEQ ID NO: 8737 - RNA, 19 nt, Artificial Sequence
  Synthetic Oligonucleotide
augguaacacgguucgagu

SEQ ID NO: 8738 - RNA, 19 nt, Artificial Sequence
  Synthetic Oligonucleotide
augauaacacaguucgaau

SEQ ID NO: 8739 - RNA, 19 nt, Artificial Sequence
  Synthetic Oligonucleotide
augauaacacaguucaagu

SEQ ID NO: 8740 - RNA, 19 nt, Artificial Sequence
  Synthetic Oligonucleotide
augauaacacaguuagagu

SEQ ID NO: 8741 - RNA, 19 nt, Artificial Sequence
  Synthetic Oligonucleotide
augauaacacagcucgagu

SEQ ID NO: 8742 - RNA, 19 nt, Artificial Sequence
  Synthetic Oligonucleotide
augauaawacaguucgagu

SEQ ID NO: 8743 - RNA, 19 nt, Artificial Sequence
  Synthetic Oligonucleotide
augacaacacaguucgagu

SEQ ID NO: 8744 - RNA, 19 nt, Artificial Sequence
  Synthetic Oligonucleotide
auaauaacacaguucgagu

SEQ ID NO: 8745 - RNA, 19 nt, Artificial Sequence
  Synthetic Oligonucleotide
gugauaacacuguucgagu

SEQ ID NO: 8746 - RNA, 19 nt, Artificial Sequence
  Synthetic Oligonucleotide
augguaacacgguucgagg

SEQ ID NO: 8747 - RNA, 19 nt, Artificial Sequence
  Synthetic Oligonucleotide
aaugauaacacaguucggg

SEQ ID NO: 8748 - RNA, 19 nt, Artificial Sequence
  Synthetic Oligonucleotide
aaugauaacacgguucgag

SEQ ID NO: 8749 - RNA, 19 nt, Artificial Sequence
  Synthetic Oligonucleotide
aaugauaauacaguucgag

SEQ ID NO: 8750 - RNA, 19 nt, Artificial Sequence
  Synthetic Oligonucleotide
aaugguaacacaguucgag

SEQ ID NO: 8751 - RNA, 19 nt, Artificial Sequence
  Synthetic Oligonucleotide
agugauaacacaguucgag

SEQ ID NO: 8752 - RNA, 19 nt, Artificial Sequence
  Synthetic Oligonucleotide
aaugguaacacgguucgag

SEQ ID NO: 8753 - RNA, 19 nt, Artificial Sequence
  Synthetic Oligonucleotide
aaugauaacacaguucgaa

SEQ ID NO: 8754 - RNA, 19 nt, Artificial Sequence
  Synthetic Oligonucleotide
aaugauaacacaguucaag

SEQ ID NO: 8755 - RNA, 19 nt, Artificial Sequence
  Synthetic Oligonucleotide
aaugauaacacaguuagag

SEQ ID NO: 8756 - RNA, 19 nt, Artificial Sequence
  Synthetic Oligonucleotide
aaugauaacacagcucgag

SEQ ID NO: 8757 - RNA, 19 nt, Artificial Sequence
  Synthetic Oligonucleotide
aaugauaawacaguucgag

SEQ ID NO: 8758 - RNA, 19 nt, Artificial Sequence
  Synthetic Oligonucleotide
aaugacaacacaguucgag

SEQ ID NO: 8759 - RNA, 19 nt, Artificial Sequence
  Synthetic Oligonucleotide
aauaauaacacaguucgag

SEQ ID NO: 8760 - RNA, 19 nt, Artificial Sequence
  Synthetic Oligonucleotide
agugauaacacuguucgag

SEQ ID NO: 8761 - RNA, 19 nt, Artificial Sequence
  Synthetic Oligonucleotide
uaacacaguucgggucucu

SEQ ID NO: 8762 - RNA, 19 nt, Artificial Sequence
  Synthetic Oligonucleotide
uaacacgguucgagucucu

SEQ ID NO: 8763 - RNA, 19 nt, Artificial Sequence
  Synthetic Oligonucleotide
uaauacaguucgagucucu

SEQ ID NO: 8764 - RNA, 19 nt, Artificial Sequence
  Synthetic Oligonucleotide
uaacacaguucgagucacu

SEQ ID NO: 8765 - RNA, 19 nt, Artificial Sequence
  Synthetic Oligonucleotide
uaacacaguucgaguaucu

SEQ ID NO: 8766 - RNA, 19 nt, Artificial Sequence
  Synthetic Oligonucleotide
uaacacaguucgaaucucu

SEQ ID NO: 8767 - RNA, 19 nt, Artificial Sequence
  Synthetic Oligonucleotide
uaacacaguucaagucucu

SEQ ID NO: 8768 - RNA, 19 nt, Artificial Sequence
  Synthetic Oligonucleotide
uaacacaguuagagucucu

SEQ ID NO: 8769 - RNA, 19 nt, Artificial Sequence
  Synthetic Oligonucleotide
uaacacagcucgagucucu

SEQ ID NO: 8770 - RNA, 19 nt, Artificial Sequence
  Synthetic Oligonucleotide
uaacacuguucgagucucu

SEQ ID NO: 8771 - RNA, 19 nt, Artificial Sequence
  Synthetic Oligonucleotide
uaawacaguucgagucucu

SEQ ID NO: 8772 - RNA, 19 nt, Artificial Sequence
  Synthetic Oligonucleotide
caacacaguucgagucucu

SEQ ID NO: 8773 - RNA, 19 nt, Artificial Sequence
  Synthetic Oligonucleotide
uaacacgguucgaggcucu

SEQ ID NO: 8774 - RNA, 19 nt, Artificial Sequence
  Synthetic Oligonucleotide
uaacacaguucaagucacu

SEQ ID NO: 8775 - RNA, 19 nt, Artificial Sequence
  Synthetic Oligonucleotide
auaacacaguucgggucuc

SEQ ID NO: 8776 - RNA, 19 nt, Artificial Sequence
  Synthetic Oligonucleotide
auaacacgguucgagucuc

SEQ ID NO: 8777 - RNA, 19 nt, Artificial Sequence
  Synthetic Oligonucleotide
auaauacaguucgagucuc

SEQ ID NO: 8778 - RNA, 19 nt, Artificial Sequence
  Synthetic Oligonucleotide
guaacacaguucgagucuc

SEQ ID NO: 8779 - RNA, 19 nt, Artificial Sequence
  Synthetic Oligonucleotide
guaacacgguucgagucuc

SEQ ID NO: 8780 - RNA, 19 nt, Artificial Sequence
  Synthetic Oligonucleotide
auaacacaguucgagucac

SEQ ID NO: 8781 - RNA, 19 nt, Artificial Sequence
  Synthetic Oligonucleotide
auaacacaguucgaguauc

SEQ ID NO: 8782 - RNA, 19 nt, Artificial Sequence
  Synthetic Oligonucleotide
auaacacaguucgaaucuc

SEQ ID NO: 8783 - RNA, 19 nt, Artificial Sequence
  Synthetic Oligonucleotide
auaacacaguucaagucuc

SEQ ID NO: 8784 - RNA, 19 nt, Artificial Sequence
  Synthetic Oligonucleotide
auaacacaguuagagucuc

SEQ ID NO: 8785 - RNA, 19 nt, Artificial Sequence
  Synthetic Oligonucleotide
auaacacagcucgagucuc

SEQ ID NO: 8786 - RNA, 19 nt, Artificial Sequence
  Synthetic Oligonucleotide
auaacacuguucgagucuc

SEQ ID NO: 8787 - RNA, 19 nt, Artificial Sequence
  Synthetic Oligonucleotide
auaawacaguucgagucuc

SEQ ID NO: 8788 - RNA, 19 nt, Artificial Sequence
  Synthetic Oligonucleotide
acaacacaguucgagucuc

SEQ ID NO: 8789 - RNA, 19 nt, Artificial Sequence
  Synthetic Oligonucleotide
guaacacgguucgaggcuc

SEQ ID NO: 8790 - RNA, 19 nt, Artificial Sequence
  Synthetic Oligonucleotide
auaacacaguucaagucac

SEQ ID NO: 8791 - RNA, 19 nt, Artificial Sequence
  Synthetic Oligonucleotide
ugaggaugucaaaaaugcg

SEQ ID NO: 8792 - RNA, 19 nt, Artificial Sequence
  Synthetic Oligonucleotide
ugaggaugucaaaagugca

SEQ ID NO: 8793 - RNA, 19 nt, Artificial Sequence
  Synthetic Oligonucleotide
ugaggaugucaaagaugca

SEQ ID NO: 8794 - RNA, 19 nt, Artificial Sequence
  Synthetic Oligonucleotide
ugaggaugucaaaauugca

SEQ ID NO: 8795 - RNA, 19 nt, Artificial Sequence
  Synthetic Oligonucleotide
ugaggauaucaaaaaugca

SEQ ID NO: 8796 - RNA, 19 nt, Artificial Sequence
  Synthetic Oligonucleotide
ugagaaugucaaaaaugca

SEQ ID NO: 8797 - RNA, 19 nt, Artificial Sequence
  Synthetic Oligonucleotide
uaaggaugucaaaaaugca

SEQ ID NO: 8798 - RNA, 19 nt, Artificial Sequence
  Synthetic Oligonucleotide
agaggaugucaaaaaugca

SEQ ID NO: 8799 - RNA, 19 nt, Artificial Sequence
  Synthetic Oligonucleotide
cgaggaugucaaaaaugca

SEQ ID NO: 8800 - RNA, 19 nt, Artificial Sequence
  Synthetic Oligonucleotide
ugagaaugucaaagaugca

SEQ ID NO: 8801 - RNA, 19 nt, Artificial Sequence
  Synthetic Oligonucleotide
augucaaaaaugcaguugg

SEQ ID NO: 8802 - RNA, 19 nt, Artificial Sequence
  Synthetic Oligonucleotide
augucaaaaaugcgauugg

SEQ ID NO: 8803 - RNA, 19 nt, Artificial Sequence
  Synthetic Oligonucleotide
augucaaaagugcaauugg

SEQ ID NO: 8804 - RNA, 19 nt, Artificial Sequence
  Synthetic Oligonucleotide
augucaaagaugcaauugg

SEQ ID NO: 8805 - RNA, 19 nt, Artificial Sequence
  Synthetic Oligonucleotide
augucaaagaugcaguugg

SEQ ID NO: 8806 - RNA, 19 nt, Artificial Sequence
  Synthetic Oligonucleotide
augucaaaaaugcaauuag

SEQ ID NO: 8807 - RNA, 19 nt, Artificial Sequence
  Synthetic Oligonucleotide
augucaaaauugcaauugg

SEQ ID NO: 8808 - RNA, 19 nt, Artificial Sequence
  Synthetic Oligonucleotide
auaucaaaaaugcaauugg

SEQ ID NO: 8809 - RNA, 19 nt, Artificial Sequence
  Synthetic Oligonucleotide
aggaugucaaaaaugcagu

SEQ ID NO: 8810 - RNA, 19 nt, Artificial Sequence
  Synthetic Oligonucleotide
aggaugucaaaaaugcgau

SEQ ID NO: 8811 - RNA, 19 nt, Artificial Sequence
  Synthetic Oligonucleotide
aggaugucaaaagugcaau

SEQ ID NO: 8812 - RNA, 19 nt, Artificial Sequence
  Synthetic Oligonucleotide
aggaugucaaagaugcaau

SEQ ID NO: 8813 - RNA, 19 nt, Artificial Sequence
  Synthetic Oligonucleotide
aggaugucaaaauugcaau

SEQ ID NO: 8814 - RNA, 19 nt, Artificial Sequence
  Synthetic Oligonucleotide
aggauaucaaaaaugcaau

SEQ ID NO: 8815 - RNA, 19 nt, Artificial Sequence
  Synthetic Oligonucleotide
agaaugucaaaaaugcaau

SEQ ID NO: 8816 - RNA, 19 nt, Artificial Sequence
  Synthetic Oligonucleotide
agaaugucaaagaugcagu

SEQ ID NO: 8817 - RNA, 19 nt, Artificial Sequence
  Synthetic Oligonucleotide
ggaugucaaaaaugcaguu

SEQ ID NO: 8818 - RNA, 19 nt, Artificial Sequence
  Synthetic Oligonucleotide
ggaugucaaaaaugcgauu

SEQ ID NO: 8819 - RNA, 19 nt, Artificial Sequence
  Synthetic Oligonucleotide
ggaugucaaaagugcaauu

SEQ ID NO: 8820 - RNA, 19 nt, Artificial Sequence
  Synthetic Oligonucleotide
ggaugucaaagaugcaauu

SEQ ID NO: 8821 - RNA, 19 nt, Artificial Sequence
  Synthetic Oligonucleotide
ggaugucaaaauugcaauu

SEQ ID NO: 8822 - RNA, 19 nt, Artificial Sequence
  Synthetic Oligonucleotide
ggauaucaaaaaugcaauu

SEQ ID NO: 8823 - RNA, 19 nt, Artificial Sequence
  Synthetic Oligonucleotide
gaaugucaaaaaugcaauu

SEQ ID NO: 8824 - RNA, 19 nt, Artificial Sequence
  Synthetic Oligonucleotide
gaaugucaaagaugcaguu

SEQ ID NO: 8825 - RNA, 19 nt, Artificial Sequence
  Synthetic Oligonucleotide
gaugucaaaaaugcaguug

SEQ ID NO: 8826 - RNA, 19 nt, Artificial Sequence
  Synthetic Oligonucleotide
gaugucaaaaaugcgauug

SEQ ID NO: 8827 - RNA, 19 nt, Artificial Sequence
  Synthetic Oligonucleotide
gaugucaaaagugcaauug

SEQ ID NO: 8828 - RNA, 19 nt, Artificial Sequence
  Synthetic Oligonucleotide
gaugucaaagaugcaauug

SEQ ID NO: 8829 - RNA, 19 nt, Artificial Sequence
  Synthetic Oligonucleotide
gaugucaaaaaugcaauua

SEQ ID NO: 8830 - RNA, 19 nt, Artificial Sequence
  Synthetic Oligonucleotide
gaugucaaaauugcaauug

SEQ ID NO: 8831 - RNA, 19 nt, Artificial Sequence
  Synthetic Oligonucleotide
gauaucaaaaaugcaauug

SEQ ID NO: 8832 - RNA, 19 nt, Artificial Sequence
  Synthetic Oligonucleotide
aaugucaaaaaugcaauug

SEQ ID NO: 8833 - RNA, 19 nt, Artificial Sequence
  Synthetic Oligonucleotide
aaugucaaagaugcaguug

SEQ ID NO: 8834 - RNA, 19 nt, Artificial Sequence
  Synthetic Oligonucleotide
gaggaugucaaaaaugcag

SEQ ID NO: 8835 - RNA, 19 nt, Artificial Sequence
  Synthetic Oligonucleotide
gaggaugucaaaaaugcga

SEQ ID NO: 8836 - RNA, 19 nt, Artificial Sequence
  Synthetic Oligonucleotide
gaggaugucaaaagugcaa

SEQ ID NO: 8837 - RNA, 19 nt, Artificial Sequence
  Synthetic Oligonucleotide
gaggaugucaaagaugcaa

SEQ ID NO: 8838 - RNA, 19 nt, Artificial Sequence
  Synthetic Oligonucleotide
gaggaugucaaaauugcaa

SEQ ID NO: 8839 - RNA, 19 nt, Artificial Sequence
  Synthetic Oligonucleotide
gaggauaucaaaaaugcaa

SEQ ID NO: 8840 - RNA, 19 nt, Artificial Sequence
  Synthetic Oligonucleotide
gagaaugucaaaaaugcaa

SEQ ID NO: 8841 - RNA, 19 nt, Artificial Sequence
  Synthetic Oligonucleotide
aaggaugucaaaaaugcaa

SEQ ID NO: 8842 - RNA, 19 nt, Artificial Sequence
  Synthetic Oligonucleotide
gagaaugucaaagaugcag

SEQ ID NO: 8843 - RNA, 19 nt, Artificial Sequence
  Synthetic Oligonucleotide
gauaacacaguucgggucu

SEQ ID NO: 8844 - RNA, 19 nt, Artificial Sequence
  Synthetic Oligonucleotide
gauaacacgguucgagucu

SEQ ID NO: 8845 - RNA, 19 nt, Artificial Sequence
  Synthetic Oligonucleotide
gauaauacaguucgagucu

SEQ ID NO: 8846 - RNA, 19 nt, Artificial Sequence
  Synthetic Oligonucleotide
gguaacacaguucgagucu

SEQ ID NO: 8847 - RNA, 19 nt, Artificial Sequence
  Synthetic Oligonucleotide
gguaacacgguucgagucu

SEQ ID NO: 8848 - RNA, 19 nt, Artificial Sequence
  Synthetic Oligonucleotide
gauaacacaguucgaguca

SEQ ID NO: 8849 - RNA, 19 nt, Artificial Sequence
  Synthetic Oligonucleotide
gauaacacaguucgaguau

SEQ ID NO: 8850 - RNA, 19 nt, Artificial Sequence
  Synthetic Oligonucleotide
gauaacacaguucgaaucu

SEQ ID NO: 8851 - RNA, 19 nt, Artificial Sequence
  Synthetic Oligonucleotide
gauaacacaguucaagucu

SEQ ID NO: 8852 - RNA, 19 nt, Artificial Sequence
  Synthetic Oligonucleotide
gauaacacaguuagagucu

SEQ ID NO: 8853 - RNA, 19 nt, Artificial Sequence
  Synthetic Oligonucleotide
gauaacacagcucgagucu

SEQ ID NO: 8854 - RNA, 19 nt, Artificial Sequence
  Synthetic Oligonucleotide
gauaacacuguucgagucu

SEQ ID NO: 8855 - RNA, 19 nt, Artificial Sequence
  Synthetic Oligonucleotide
gauaawacaguucgagucu

SEQ ID NO: 8856 - RNA, 19 nt, Artificial Sequence
  Synthetic Oligonucleotide
gacaacacaguucgagucu

SEQ ID NO: 8857 - RNA, 19 nt, Artificial Sequence
  Synthetic Oligonucleotide
aauaacacaguucgagucu

SEQ ID NO: 8858 - RNA, 19 nt, Artificial Sequence
  Synthetic Oligonucleotide
gguaacacgguucgaggcu

SEQ ID NO: 8859 - RNA, 19 nt, Artificial Sequence
  Synthetic Oligonucleotide
gauaacacaguucaaguca

SEQ ID NO: 8860 - RNA, 19 nt, Artificial Sequence
  Synthetic Oligonucleotide
cggcuucgccgggaucaga

SEQ ID NO: 8861 - RNA, 19 nt, Artificial Sequence
  Synthetic Oligonucleotide
cggcuucgucgagaucaga

SEQ ID NO: 8862 - RNA, 19 nt, Artificial Sequence
  Synthetic Oligonucleotide
cggcuucgccgagaucaaa

SEQ ID NO: 8863 - RNA, 19 nt, Artificial Sequence
  Synthetic Oligonucleotide
cggcuucgccgagauaaga

SEQ ID NO: 8864 - RNA, 19 nt, Artificial Sequence
  Synthetic Oligonucleotide
cggcuucgccgagaccaga

SEQ ID NO: 8865 - RNA, 19 nt, Artificial Sequence
  Synthetic Oligonucleotide
cggcuucgccgawaucaga

SEQ ID NO: 8866 - RNA, 19 nt, Artificial Sequence
  Synthetic Oligonucleotide
cggcuucgccgauaucaga

SEQ ID NO: 8867 - RNA, 19 nt, Artificial Sequence
  Synthetic Oligonucleotide
cggcuucgcagagaucaga

SEQ ID NO: 8868 - RNA, 19 nt, Artificial Sequence
  Synthetic Oligonucleotide
cggcuucaccgagaucaga

SEQ ID NO: 8869 - RNA, 19 nt, Artificial Sequence
  Synthetic Oligonucleotide
cggcuuagccgagaucaga

SEQ ID NO: 8870 - RNA, 19 nt, Artificial Sequence
  Synthetic Oligonucleotide
cggcuccgccgagaucaga

SEQ ID NO: 8871 - RNA, 19 nt, Artificial Sequence
  Synthetic Oligonucleotide
cggauucgccgagaucaga

SEQ ID NO: 8872 - RNA, 19 nt, Artificial Sequence
  Synthetic Oligonucleotide
cgacuucgccgagaucaga

SEQ ID NO: 8873 - RNA, 19 nt, Artificial Sequence
  Synthetic Oligonucleotide
aggcuucgccgagaucaga

SEQ ID NO: 8874 - RNA, 19 nt, Artificial Sequence
  Synthetic Oligonucleotide
cggguuugccgagaucaga

SEQ ID NO: 8875 - RNA, 19 nt, Artificial Sequence
  Synthetic Oligonucleotide
cggcuucgccgagaccaaa

SEQ ID NO: 8876 - RNA, 19 nt, Artificial Sequence
  Synthetic Oligonucleotide
cggcuucgccgawwucaga

SEQ ID NO: 8877 - RNA, 19 nt, Artificial Sequence
  Synthetic Oligonucleotide
cggcuccgccgagaucaaa

SEQ ID NO: 8878 - RNA, 19 nt, Artificial Sequence
  Synthetic Oligonucleotide
cgacuucgcagagaucaga

SEQ ID NO: 8879 - RNA, 19 nt, Artificial Sequence
  Synthetic Oligonucleotide
agacuucgccgagaucaga

SEQ ID NO: 8880 - RNA, 19 nt, Artificial Sequence
  Synthetic Oligonucleotide
cggcuccgccgggaucaaa

SEQ ID NO: 8881 - RNA, 19 nt, Artificial Sequence
  Synthetic Oligonucleotide
cggcuccgccgagaucuca

SEQ ID NO: 8882 - RNA, 19 nt, Artificial Sequence
  Synthetic Oligonucleotide
ugucaaaaaugcaguuggg

SEQ ID NO: 8883 - RNA, 19 nt, Artificial Sequence
  Synthetic Oligonucleotide
ugucaaaaaugcgauuggg

SEQ ID NO: 8884 - RNA, 19 nt, Artificial Sequence
  Synthetic Oligonucleotide
ugucaaagaugcaauuggg

SEQ ID NO: 8885 - RNA, 19 nt, Artificial Sequence
  Synthetic Oligonucleotide
ugucaaagaugcaguuggg

SEQ ID NO: 8886 - RNA, 19 nt, Artificial Sequence
  Synthetic Oligonucleotide
ugucaaaaaugcaauugga

SEQ ID NO: 8887 - RNA, 19 nt, Artificial Sequence
  Synthetic Oligonucleotide
ugucaaaaaugcaauuggc

SEQ ID NO: 8888 - RNA, 19 nt, Artificial Sequence
  Synthetic Oligonucleotide
ugucaaaaaugcaauuagg

SEQ ID NO: 8889 - RNA, 19 nt, Artificial Sequence
  Synthetic Oligonucleotide
ugucaaaauugcaauuggg

SEQ ID NO: 8890 - RNA, 19 nt, Artificial Sequence
  Synthetic Oligonucleotide
ugucaaaaaugcaguugga

SEQ ID NO: 8891 - RNA, 19 nt, Artificial Sequence
  Synthetic Oligonucleotide
ugucaaaaaugcaguuggc

SEQ ID NO: 8892 - RNA, 19 nt, Artificial Sequence
  Synthetic Oligonucleotide
ugucaaaagugcaauuggc

SEQ ID NO: 8893 - RNA, 19 nt, Artificial Sequence
  Synthetic Oligonucleotide
uaucaaaaaugcaauuggc

SEQ ID NO: 8894 - RNA, 19 nt, Artificial Sequence
  Synthetic Oligonucleotide
uacagagauucgcuugggg

SEQ ID NO: 8895 - RNA, 19 nt, Artificial Sequence
  Synthetic Oligonucleotide
uacagagauuugcuuggag

SEQ ID NO: 8896 - RNA, 19 nt, Artificial Sequence
  Synthetic Oligonucleotide
uacagagauucgcuuggaa

SEQ ID NO: 8897 - RNA, 19 nt, Artificial Sequence
  Synthetic Oligonucleotide
uacagagauucgcuuggwg

SEQ ID NO: 8898 - RNA, 19 nt, Artificial Sequence
  Synthetic Oligonucleotide
uacagagauucgcuuggug

SEQ ID NO: 8899 - RNA, 19 nt, Artificial Sequence
  Synthetic Oligonucleotide
uacagagauucgcuugaag

SEQ ID NO: 8900 - RNA, 19 nt, Artificial Sequence
  Synthetic Oligonucleotide
uacagagauucgcuuagag

SEQ ID NO: 8901 - RNA, 19 nt, Artificial Sequence
  Synthetic Oligonucleotide
uacagagauucgcuuwgag

SEQ ID NO: 8902 - RNA, 19 nt, Artificial Sequence
  Synthetic Oligonucleotide
uacagagauucacuuggag

SEQ ID NO: 8903 - RNA, 19 nt, Artificial Sequence
  Synthetic Oligonucleotide
uacagagauucucuuggag

SEQ ID NO: 8904 - RNA, 19 nt, Artificial Sequence
  Synthetic Oligonucleotide
uacagagauacgcuuggag

SEQ ID NO: 8905 - RNA, 19 nt, Artificial Sequence
  Synthetic Oligonucleotide
uacagaaauucgcuuggag

SEQ ID NO: 8906 - RNA, 19 nt, Artificial Sequence
  Synthetic Oligonucleotide
uacaaagauucgcuuggag

SEQ ID NO: 8907 - RNA, 19 nt, Artificial Sequence
  Synthetic Oligonucleotide
uacaaagauucgcuugggg

SEQ ID NO: 8908 - RNA, 19 nt, Artificial Sequence
  Synthetic Oligonucleotide
acagagauucgcuuggagg

SEQ ID NO: 8909 - RNA, 19 nt, Artificial Sequence
  Synthetic Oligonucleotide
acagagauucgcuugggga

SEQ ID NO: 8910 - RNA, 19 nt, Artificial Sequence
  Synthetic Oligonucleotide
acagagauuugcuuggaga

SEQ ID NO: 8911 - RNA, 19 nt, Artificial Sequence
  Synthetic Oligonucleotide
acagagauucgcuuggaaa

SEQ ID NO: 8912 - RNA, 19 nt, Artificial Sequence
  Synthetic Oligonucleotide
acagagauucgcuuggwga

SEQ ID NO: 8913 - RNA, 19 nt, Artificial Sequence
  Synthetic Oligonucleotide
acagagauucgcuugguga

SEQ ID NO: 8914 - RNA, 19 nt, Artificial Sequence
  Synthetic Oligonucleotide
acagagauucgcuugaaga

SEQ ID NO: 8915 - RNA, 19 nt, Artificial Sequence
  Synthetic Oligonucleotide
acagagauucgcuuagaga

SEQ ID NO: 8916 - RNA, 19 nt, Artificial Sequence
  Synthetic Oligonucleotide
acagagauucgcuuwgaga

SEQ ID NO: 8917 - RNA, 19 nt, Artificial Sequence
  Synthetic Oligonucleotide
acagagauucacuuggaga

SEQ ID NO: 8918 - RNA, 19 nt, Artificial Sequence
  Synthetic Oligonucleotide
acagagauucucuuggaga

SEQ ID NO: 8919 - RNA, 19 nt, Artificial Sequence
  Synthetic Oligonucleotide
acagagauacgcuuggaga

SEQ ID NO: 8920 - RNA, 19 nt, Artificial Sequence
  Synthetic Oligonucleotide
acagaaauucgcuuggaga

SEQ ID NO: 8921 - RNA, 19 nt, Artificial Sequence
  Synthetic Oligonucleotide
acaaagauucgcuuggaga

SEQ ID NO: 8922 - RNA, 19 nt, Artificial Sequence
  Synthetic Oligonucleotide
acaaagauucgcuugggga

SEQ ID NO: 8923 - RNA, 19 nt, Artificial Sequence
  Synthetic Oligonucleotide
ucuacagagauuugcuugg

SEQ ID NO: 8924 - RNA, 19 nt, Artificial Sequence
  Synthetic Oligonucleotide
ucuacagagauucgcuuga

SEQ ID NO: 8925 - RNA, 19 nt, Artificial Sequence
  Synthetic Oligonucleotide
ucuacagagauucgcuuag

SEQ ID NO: 8926 - RNA, 19 nt, Artificial Sequence
  Synthetic Oligonucleotide
ucuacagagauucgcuuwg

SEQ ID NO: 8927 - RNA, 19 nt, Artificial Sequence
  Synthetic Oligonucleotide
ucuacagagauucacuugg

SEQ ID NO: 8928 - RNA, 19 nt, Artificial Sequence
  Synthetic Oligonucleotide
ucuacagagauucucuugg

SEQ ID NO: 8929 - RNA, 19 nt, Artificial Sequence
  Synthetic Oligonucleotide
ucuacagaaauucgcuugg

SEQ ID NO: 8930 - RNA, 19 nt, Artificial Sequence
  Synthetic Oligonucleotide
ucuacaaagauucgcuugg

SEQ ID NO: 8931 - RNA, 19 nt, Artificial Sequence
  Synthetic Oligonucleotide
uauacagagauucgcuugg

SEQ ID NO: 8932 - RNA, 19 nt, Artificial Sequence
  Synthetic Oligonucleotide
uauacagagauacgcuugg

SEQ ID NO: 8933 - RNA, 19 nt, Artificial Sequence
  Synthetic Oligonucleotide
ggagcaauuguuggcgaga

SEQ ID NO: 8934 - RNA, 19 nt, Artificial Sequence
  Synthetic Oligonucleotide
ggagcaauuguuggcggaa

SEQ ID NO: 8935 - RNA, 19 nt, Artificial Sequence
  Synthetic Oligonucleotide
ggagcaauuguuggugaaa

SEQ ID NO: 8936 - RNA, 19 nt, Artificial Sequence
  Synthetic Oligonucleotide
ggagcaguuguuggcgaaa

SEQ ID NO: 8937 - RNA, 19 nt, Artificial Sequence
  Synthetic Oligonucleotide
ggaguaauuguuggcgaaa

SEQ ID NO: 8938 - RNA, 19 nt, Artificial Sequence
  Synthetic Oligonucleotide
ggggcaauuguuggcgaaa

SEQ ID NO: 8939 - RNA, 19 nt, Artificial Sequence
  Synthetic Oligonucleotide
ggggcaauuguuggcgaga

SEQ ID NO: 8940 - RNA, 19 nt, Artificial Sequence
  Synthetic Oligonucleotide
ggagcaauuguugccgaaa

SEQ ID NO: 8941 - RNA, 19 nt, Artificial Sequence
  Synthetic Oligonucleotide
ggagcaauuguaggcgaaa

SEQ ID NO: 8942 - RNA, 19 nt, Artificial Sequence
  Synthetic Oligonucleotide
ggagcaauugugggcgaaa

SEQ ID NO: 8943 - RNA, 19 nt, Artificial Sequence
  Synthetic Oligonucleotide
ggagcaauugcuggcgaaa

SEQ ID NO: 8944 - RNA, 19 nt, Artificial Sequence
  Synthetic Oligonucleotide
ggagcaauuauuggcgaaa

SEQ ID NO: 8945 - RNA, 19 nt, Artificial Sequence
  Synthetic Oligonucleotide
ggaacaauuguuggcgaaa

SEQ ID NO: 8946 - RNA, 19 nt, Artificial Sequence
  Synthetic Oligonucleotide
ggcgcaauuguuggcgaaa

SEQ ID NO: 8947 - RNA, 19 nt, Artificial Sequence
  Synthetic Oligonucleotide
ggugcaauuguuggcgaaa

SEQ ID NO: 8948 - RNA, 19 nt, Artificial Sequence
  Synthetic Oligonucleotide
gaagcaauuguuggcgaaa

SEQ ID NO: 8949 - RNA, 19 nt, Artificial Sequence
  Synthetic Oligonucleotide
ggaacaauuguuggugaaa

SEQ ID NO: 8950 - RNA, 19 nt, Artificial Sequence
  Synthetic Oligonucleotide
ggggcaauuguaggcgaaa

SEQ ID NO: 8951 - RNA, 19 nt, Artificial Sequence
  Synthetic Oligonucleotide
gggacaauuguuggcgaaa

SEQ ID NO: 8952 - RNA, 19 nt, Artificial Sequence
  Synthetic Oligonucleotide
ggagcaauugucggagaaa

SEQ ID NO: 8953 - RNA, 19 nt, Artificial Sequence
  Synthetic Oligonucleotide
ggagcaauagugggcgaaa

SEQ ID NO: 8954 - RNA, 19 nt, Artificial Sequence
  Synthetic Oligonucleotide
ggagcaaucguuggagaaa

SEQ ID NO: 8955 - RNA, 19 nt, Artificial Sequence
  Synthetic Oligonucleotide
ggacgaauuguuggcgaaa

SEQ ID NO: 8956 - RNA, 19 nt, Artificial Sequence
  Synthetic Oligonucleotide
ggagcaaucguuggagaga

SEQ ID NO: 8957 - RNA, 19 nt, Artificial Sequence
  Synthetic Oligonucleotide
ggagcaaucguaggagaaa

SEQ ID NO: 8958 - RNA, 19 nt, Artificial Sequence
  Synthetic Oligonucleotide
ggagcaaucguaggggaaa

SEQ ID NO: 8959 - RNA, 19 nt, Artificial Sequence
  Synthetic Oligonucleotide
ggagcaaucgugggagaaa

SEQ ID NO: 8960 - RNA, 19 nt, Artificial Sequence
  Synthetic Oligonucleotide
ggagcaaucgugggggaaa

SEQ ID NO: 8961 - RNA, 19 nt, Artificial Sequence
  Synthetic Oligonucleotide
gagcaauuguuggcgagau

SEQ ID NO: 8962 - RNA, 19 nt, Artificial Sequence
  Synthetic Oligonucleotide
gagcaauuguuggcggaau

SEQ ID NO: 8963 - RNA, 19 nt, Artificial Sequence
  Synthetic Oligonucleotide
gagcaauuguuggugaaau

SEQ ID NO: 8964 - RNA, 19 nt, Artificial Sequence
  Synthetic Oligonucleotide
gagcaguuguuggcgaaau

SEQ ID NO: 8965 - RNA, 19 nt, Artificial Sequence
  Synthetic Oligonucleotide
gaguaauuguuggcgaaau

SEQ ID NO: 8966 - RNA, 19 nt, Artificial Sequence
  Synthetic Oligonucleotide
gggcaauuguuggcgaaau

SEQ ID NO: 8967 - RNA, 19 nt, Artificial Sequence
  Synthetic Oligonucleotide
gggcaauuguuggcgagau

SEQ ID NO: 8968 - RNA, 19 nt, Artificial Sequence
  Synthetic Oligonucleotide
gagcaauuguugccgaaau

SEQ ID NO: 8969 - RNA, 19 nt, Artificial Sequence
  Synthetic Oligonucleotide
gagcaauuguaggcgaaau

SEQ ID NO: 8970 - RNA, 19 nt, Artificial Sequence
  Synthetic Oligonucleotide
gagcaauugugggcgaaau

SEQ ID NO: 8971 - RNA, 19 nt, Artificial Sequence
  Synthetic Oligonucleotide
gagcaauugcuggcgaaau

SEQ ID NO: 8972 - RNA, 19 nt, Artificial Sequence
  Synthetic Oligonucleotide
gagcaauuauuggcgaaau

SEQ ID NO: 8973 - RNA, 19 nt, Artificial Sequence
  Synthetic Oligonucleotide
gaacaauuguuggcgaaau

SEQ ID NO: 8974 - RNA, 19 nt, Artificial Sequence
  Synthetic Oligonucleotide
gcgcaauuguuggcgaaau

SEQ ID NO: 8975 - RNA, 19 nt, Artificial Sequence
  Synthetic Oligonucleotide
gugcaauuguuggcgaaau

SEQ ID NO: 8976 - RNA, 19 nt, Artificial Sequence
  Synthetic Oligonucleotide
aagcaauuguuggcgaaau

SEQ ID NO: 8977 - RNA, 19 nt, Artificial Sequence
  Synthetic Oligonucleotide
gaacaauuguuggugaaau

SEQ ID NO: 8978 - RNA, 19 nt, Artificial Sequence
  Synthetic Oligonucleotide
gggcaauuguaggcgaaau

SEQ ID NO: 8979 - RNA, 19 nt, Artificial Sequence
  Synthetic Oligonucleotide
ggacaauuguuggcgaaau

SEQ ID NO: 8980 - RNA, 19 nt, Artificial Sequence
  Synthetic Oligonucleotide
gagcaauugucggagaaau

SEQ ID NO: 8981 - RNA, 19 nt, Artificial Sequence
  Synthetic Oligonucleotide
gagcaauagugggcgaaau

SEQ ID NO: 8982 - RNA, 19 nt, Artificial Sequence
  Synthetic Oligonucleotide
gagcaaucguuggagaaau

SEQ ID NO: 8983 - RNA, 19 nt, Artificial Sequence
  Synthetic Oligonucleotide
gacgaauuguuggcgaaau

SEQ ID NO: 8984 - RNA, 19 nt, Artificial Sequence
  Synthetic Oligonucleotide
gagcaaucguuggagagau

SEQ ID NO: 8985 - RNA, 19 nt, Artificial Sequence
  Synthetic Oligonucleotide
gagcaaucguaggagaaau

SEQ ID NO: 8986 - RNA, 19 nt, Artificial Sequence
  Synthetic Oligonucleotide
gagcaaucguaggggaaau

SEQ ID NO: 8987 - RNA, 19 nt, Artificial Sequence
  Synthetic Oligonucleotide
gagcaaucgugggagaaau

SEQ ID NO: 8988 - RNA, 19 nt, Artificial Sequence
  Synthetic Oligonucleotide
gagcaaucgugggggaaau

SEQ ID NO: 8989 - RNA, 19 nt, Artificial Sequence
  Synthetic Oligonucleotide
gggagcaauuguuggcgag

SEQ ID NO: 8990 - RNA, 19 nt, Artificial Sequence
  Synthetic Oligonucleotide
gggagcaauuguuggcgga

SEQ ID NO: 8991 - RNA, 19 nt, Artificial Sequence
  Synthetic Oligonucleotide
gggagcaauuguuggugaa

SEQ ID NO: 8992 - RNA, 19 nt, Artificial Sequence
  Synthetic Oligonucleotide
gggagcaguuguuggcgaa

SEQ ID NO: 8993 - RNA, 19 nt, Artificial Sequence
  Synthetic Oligonucleotide
gggaguaauuguuggcgaa

SEQ ID NO: 8994 - RNA, 19 nt, Artificial Sequence
  Synthetic Oligonucleotide
gggggcaauuguuggcgaa

SEQ ID NO: 8995 - RNA, 19 nt, Artificial Sequence
  Synthetic Oligonucleotide
gggggcaauuguuggcgag

SEQ ID NO: 8996 - RNA, 19 nt, Artificial Sequence
  Synthetic Oligonucleotide
gggagcaauuguugccgaa

SEQ ID NO: 8997 - RNA, 19 nt, Artificial Sequence
  Synthetic Oligonucleotide
gggagcaauuguaggcgaa

SEQ ID NO: 8998 - RNA, 19 nt, Artificial Sequence
  Synthetic Oligonucleotide
gggagcaauugugggcgaa

SEQ ID NO: 8999 - RNA, 19 nt, Artificial Sequence
  Synthetic Oligonucleotide
gggagcaauugcuggcgaa

SEQ ID NO: 9000 - RNA, 19 nt, Artificial Sequence
  Synthetic Oligonucleotide
gggagcaauuauuggcgaa

SEQ ID NO: 9001 - RNA, 19 nt, Artificial Sequence
  Synthetic Oligonucleotide
gggaacaauuguuggcgaa

SEQ ID NO: 9002 - RNA, 19 nt, Artificial Sequence
  Synthetic Oligonucleotide
gggcgcaauuguuggcgaa

SEQ ID NO: 9003 - RNA, 19 nt, Artificial Sequence
  Synthetic Oligonucleotide
gggugcaauuguuggcgaa

SEQ ID NO: 9004 - RNA, 19 nt, Artificial Sequence
  Synthetic Oligonucleotide
ggaagcaauuguuggcgaa

SEQ ID NO: 9005 - RNA, 19 nt, Artificial Sequence
  Synthetic Oligonucleotide
aggagcaauuguuggcgaa

SEQ ID NO: 9006 - RNA, 19 nt, Artificial Sequence
  Synthetic Oligonucleotide
uggagcaauuguuggcgaa

SEQ ID NO: 9007 - RNA, 19 nt, Artificial Sequence
  Synthetic Oligonucleotide
gggaacaauuguuggugaa

SEQ ID NO: 9008 - RNA, 19 nt, Artificial Sequence
  Synthetic Oligonucleotide
ggggacaauuguuggcgaa

SEQ ID NO: 9009 - RNA, 19 nt, Artificial Sequence
  Synthetic Oligonucleotide
gggagcaauugucggagaa

SEQ ID NO: 9010 - RNA, 19 nt, Artificial Sequence
  Synthetic Oligonucleotide
gggagcaaucguuggagaa

SEQ ID NO: 9011 - RNA, 19 nt, Artificial Sequence
  Synthetic Oligonucleotide
gggacgaauuguuggcgaa

SEQ ID NO: 9012 - RNA, 19 nt, Artificial Sequence
  Synthetic Oligonucleotide
aggagcaauugugggcgaa

SEQ ID NO: 9013 - RNA, 19 nt, Artificial Sequence
  Synthetic Oligonucleotide
gggagcaaucguuggagag

SEQ ID NO: 9014 - RNA, 19 nt, Artificial Sequence
  Synthetic Oligonucleotide
aggggcaauuguaggcgaa

SEQ ID NO: 9015 - RNA, 19 nt, Artificial Sequence
  Synthetic Oligonucleotide
gggagcaaucgugggagaa

SEQ ID NO: 9016 - RNA, 19 nt, Artificial Sequence
  Synthetic Oligonucleotide
aggagcaauagugggcgaa

SEQ ID NO: 9017 - RNA, 19 nt, Artificial Sequence
  Synthetic Oligonucleotide
aggagcaaucguuggagaa

SEQ ID NO: 9018 - RNA, 19 nt, Artificial Sequence
  Synthetic Oligonucleotide
agggagcaauuguuggcgg

SEQ ID NO: 9019 - RNA, 19 nt, Artificial Sequence
  Synthetic Oligonucleotide
agggagcaauuguugguga

SEQ ID NO: 9020 - RNA, 19 nt, Artificial Sequence
  Synthetic Oligonucleotide
agggagcaguuguuggcga

SEQ ID NO: 9021 - RNA, 19 nt, Artificial Sequence
  Synthetic Oligonucleotide
agggaguaauuguuggcga

SEQ ID NO: 9022 - RNA, 19 nt, Artificial Sequence
  Synthetic Oligonucleotide
agggggcaauuguuggcga

SEQ ID NO: 9023 - RNA, 19 nt, Artificial Sequence
  Synthetic Oligonucleotide
agggagcaauuguugccga

SEQ ID NO: 9024 - RNA, 19 nt, Artificial Sequence
  Synthetic Oligonucleotide
agggagcaauuguaggcga

SEQ ID NO: 9025 - RNA, 19 nt, Artificial Sequence
  Synthetic Oligonucleotide
agggagcaauugugggcga

SEQ ID NO: 9026 - RNA, 19 nt, Artificial Sequence
  Synthetic Oligonucleotide
agggagcaauugcuggcga

SEQ ID NO: 9027 - RNA, 19 nt, Artificial Sequence
  Synthetic Oligonucleotide
agggagcaauuauuggcga

SEQ ID NO: 9028 - RNA, 19 nt, Artificial Sequence
  Synthetic Oligonucleotide
agggaacaauuguuggcga

SEQ ID NO: 9029 - RNA, 19 nt, Artificial Sequence
  Synthetic Oligonucleotide
agggcgcaauuguuggcga

SEQ ID NO: 9030 - RNA, 19 nt, Artificial Sequence
  Synthetic Oligonucleotide
agggugcaauuguuggcga

SEQ ID NO: 9031 - RNA, 19 nt, Artificial Sequence
  Synthetic Oligonucleotide
aggaagcaauuguuggcga

SEQ ID NO: 9032 - RNA, 19 nt, Artificial Sequence
  Synthetic Oligonucleotide
aaggagcaauuguuggcga

SEQ ID NO: 9033 - RNA, 19 nt, Artificial Sequence
  Synthetic Oligonucleotide
auggagcaauuguuggcga

SEQ ID NO: 9034 - RNA, 19 nt, Artificial Sequence
  Synthetic Oligonucleotide
cgggagcaauuguuggcga

SEQ ID NO: 9035 - RNA, 19 nt, Artificial Sequence
  Synthetic Oligonucleotide
agggaacaauuguugguga

SEQ ID NO: 9036 - RNA, 19 nt, Artificial Sequence
  Synthetic Oligonucleotide
aggggacaauuguuggcga

SEQ ID NO: 9037 - RNA, 19 nt, Artificial Sequence
  Synthetic Oligonucleotide
agggagcaauugucggaga

SEQ ID NO: 9038 - RNA, 19 nt, Artificial Sequence
  Synthetic Oligonucleotide
agggagcaaucguuggaga

SEQ ID NO: 9039 - RNA, 19 nt, Artificial Sequence
  Synthetic Oligonucleotide
agggacgaauuguuggcga

SEQ ID NO: 9040 - RNA, 19 nt, Artificial Sequence
  Synthetic Oligonucleotide
aaggagcaauugugggcga

SEQ ID NO: 9041 - RNA, 19 nt, Artificial Sequence
  Synthetic Oligonucleotide
aaggggcaauuguaggcga

SEQ ID NO: 9042 - RNA, 19 nt, Artificial Sequence
  Synthetic Oligonucleotide
agggagcaaucgugggaga

SEQ ID NO: 9043 - RNA, 19 nt, Artificial Sequence
  Synthetic Oligonucleotide
aaggagcaauagugggcga

SEQ ID NO: 9044 - RNA, 19 nt, Artificial Sequence
  Synthetic Oligonucleotide
aaggagcaaucguuggaga

SEQ ID NO: 9045 - RNA, 19 nt, Artificial Sequence
  Synthetic Oligonucleotide
gagggagcaauuguuggug

SEQ ID NO: 9046 - RNA, 19 nt, Artificial Sequence
  Synthetic Oligonucleotide
gagggagcaguuguuggcg

SEQ ID NO: 9047 - RNA, 19 nt, Artificial Sequence
  Synthetic Oligonucleotide
gagggaguaauuguuggcg

SEQ ID NO: 9048 - RNA, 19 nt, Artificial Sequence
  Synthetic Oligonucleotide
gagggggcaauuguuggcg

SEQ ID NO: 9049 - RNA, 19 nt, Artificial Sequence
  Synthetic Oligonucleotide
gagggagcaauuguugccg

SEQ ID NO: 9050 - RNA, 19 nt, Artificial Sequence
  Synthetic Oligonucleotide
gagggagcaauuguaggcg

SEQ ID NO: 9051 - RNA, 19 nt, Artificial Sequence
  Synthetic Oligonucleotide
gagggagcaauugugggcg

SEQ ID NO: 9052 - RNA, 19 nt, Artificial Sequence
  Synthetic Oligonucleotide
gagggagcaauugcuggcg

SEQ ID NO: 9053 - RNA, 19 nt, Artificial Sequence
  Synthetic Oligonucleotide
gagggagcaauuauuggcg

SEQ ID NO: 9054 - RNA, 19 nt, Artificial Sequence
  Synthetic Oligonucleotide
gagggaacaauuguuggcg

SEQ ID NO: 9055 - RNA, 19 nt, Artificial Sequence
  Synthetic Oligonucleotide
gagggcgcaauuguuggcg

SEQ ID NO: 9056 - RNA, 19 nt, Artificial Sequence
  Synthetic Oligonucleotide
gagggugcaauuguuggcg

SEQ ID NO: 9057 - RNA, 19 nt, Artificial Sequence
  Synthetic Oligonucleotide
gaggaagcaauuguuggcg

SEQ ID NO: 9058 - RNA, 19 nt, Artificial Sequence
  Synthetic Oligonucleotide
gaaggagcaauuguuggcg

SEQ ID NO: 9059 - RNA, 19 nt, Artificial Sequence
  Synthetic Oligonucleotide
gauggagcaauuguuggcg

SEQ ID NO: 9060 - RNA, 19 nt, Artificial Sequence
  Synthetic Oligonucleotide
gcgggagcaauuguuggcg

SEQ ID NO: 9061 - RNA, 19 nt, Artificial Sequence
  Synthetic Oligonucleotide
aagggagcaauuguuggcg

SEQ ID NO: 9062 - RNA, 19 nt, Artificial Sequence
  Synthetic Oligonucleotide
gagggaacaauuguuggug

SEQ ID NO: 9063 - RNA, 19 nt, Artificial Sequence
  Synthetic Oligonucleotide
gaggggacaauuguuggcg

SEQ ID NO: 9064 - RNA, 19 nt, Artificial Sequence
  Synthetic Oligonucleotide
gagggagcaauugucggag

SEQ ID NO: 9065 - RNA, 19 nt, Artificial Sequence
  Synthetic Oligonucleotide
gagggagcaaucguuggag

SEQ ID NO: 9066 - RNA, 19 nt, Artificial Sequence
  Synthetic Oligonucleotide
gagggacgaauuguuggcg

SEQ ID NO: 9067 - RNA, 19 nt, Artificial Sequence
  Synthetic Oligonucleotide
gaaggagcaauugugggcg

SEQ ID NO: 9068 - RNA, 19 nt, Artificial Sequence
  Synthetic Oligonucleotide
gaaggggcaauuguaggcg

SEQ ID NO: 9069 - RNA, 19 nt, Artificial Sequence
  Synthetic Oligonucleotide
gagggagcaaucgugggag

SEQ ID NO: 9070 - RNA, 19 nt, Artificial Sequence
  Synthetic Oligonucleotide
gaaggagcaauagugggcg

SEQ ID NO: 9071 - RNA, 19 nt, Artificial Sequence
  Synthetic Oligonucleotide
gaaggagcaaucguuggag

SEQ ID NO: 9072 - RNA, 19 nt, Artificial Sequence
  Synthetic Oligonucleotide
agggcuuucaccgaggagg

SEQ ID NO: 9073 - RNA, 19 nt, Artificial Sequence
  Synthetic Oligonucleotide
agggcuuucacugaagagg

SEQ ID NO: 9074 - RNA, 19 nt, Artificial Sequence
  Synthetic Oligonucleotide
agggcuuucaucgaagagg

SEQ ID NO: 9075 - RNA, 19 nt, Artificial Sequence
  Synthetic Oligonucleotide
agggcuuuuaccgaagagg

SEQ ID NO: 9076 - RNA, 19 nt, Artificial Sequence
  Synthetic Oligonucleotide
agggcuuucacugaggagg

SEQ ID NO: 9077 - RNA, 19 nt, Artificial Sequence
  Synthetic Oligonucleotide
agggcuuucaccgaagaag

SEQ ID NO: 9078 - RNA, 19 nt, Artificial Sequence
  Synthetic Oligonucleotide
agggcuuucaccgaagaug

SEQ ID NO: 9079 - RNA, 19 nt, Artificial Sequence
  Synthetic Oligonucleotide
agggcuuucaccgaagcgg

SEQ ID NO: 9080 - RNA, 19 nt, Artificial Sequence
  Synthetic Oligonucleotide
agggcuuucaccgaaaagg

SEQ ID NO: 9081 - RNA, 19 nt, Artificial Sequence
  Synthetic Oligonucleotide
agggcuuucaccaaagagg

SEQ ID NO: 9082 - RNA, 19 nt, Artificial Sequence
  Synthetic Oligonucleotide
agggcuuucacagaagagg

SEQ ID NO: 9083 - RNA, 19 nt, Artificial Sequence
  Synthetic Oligonucleotide
agggcuaucaccgaagagg

SEQ ID NO: 9084 - RNA, 19 nt, Artificial Sequence
  Synthetic Oligonucleotide
agggcucucaccgaagagg

SEQ ID NO: 9085 - RNA, 19 nt, Artificial Sequence
  Synthetic Oligonucleotide
agggccuucaccgaagagg

SEQ ID NO: 9086 - RNA, 19 nt, Artificial Sequence
  Synthetic Oligonucleotide
agggguuucaccgaagagg

SEQ ID NO: 9087 - RNA, 19 nt, Artificial Sequence
  Synthetic Oligonucleotide
agagcuuucaccgaagagg

SEQ ID NO: 9088 - RNA, 19 nt, Artificial Sequence
  Synthetic Oligonucleotide
aaggcuuucaccgaagagg

SEQ ID NO: 9089 - RNA, 19 nt, Artificial Sequence
  Synthetic Oligonucleotide
agggccuucaccgaggagg

SEQ ID NO: 9090 - RNA, 19 nt, Artificial Sequence
  Synthetic Oligonucleotide
agagcuuucacagaagagg

SEQ ID NO: 9091 - RNA, 19 nt, Artificial Sequence
  Synthetic Oligonucleotide
agagcuuucacagaagggg

SEQ ID NO: 9092 - RNA, 19 nt, Artificial Sequence
  Synthetic Oligonucleotide
agagcuuucacugaagaag

SEQ ID NO: 9093 - RNA, 19 nt, Artificial Sequence
  Synthetic Oligonucleotide
agagcuuucacagaagaag

SEQ ID NO: 9094 - RNA, 19 nt, Artificial Sequence
  Synthetic Oligonucleotide
agagcuuucacggaagaag

SEQ ID NO: 9095 - RNA, 19 nt, Artificial Sequence
  Synthetic Oligonucleotide
gggcuuucaccgaggaggg

SEQ ID NO: 9096 - RNA, 19 nt, Artificial Sequence
  Synthetic Oligonucleotide
gggcuuucacugaagaggg

SEQ ID NO: 9097 - RNA, 19 nt, Artificial Sequence
  Synthetic Oligonucleotide
gggcuuucaucgaagaggg

SEQ ID NO: 9098 - RNA, 19 nt, Artificial Sequence
  Synthetic Oligonucleotide
gggcuuuuaccgaagaggg

SEQ ID NO: 9099 - RNA, 19 nt, Artificial Sequence
  Synthetic Oligonucleotide
gggcuuucacugaggaggg

SEQ ID NO: 9100 - RNA, 19 nt, Artificial Sequence
  Synthetic Oligonucleotide
gggcuuucaccgaagagga

SEQ ID NO: 9101 - RNA, 19 nt, Artificial Sequence
  Synthetic Oligonucleotide
gggcuuucaccgaagaagg

SEQ ID NO: 9102 - RNA, 19 nt, Artificial Sequence
  Synthetic Oligonucleotide
gggcuuucaccgaagaugg

SEQ ID NO: 9103 - RNA, 19 nt, Artificial Sequence
  Synthetic Oligonucleotide
gggcuuucaccgaagcggg

SEQ ID NO: 9104 - RNA, 19 nt, Artificial Sequence
  Synthetic Oligonucleotide
gggcuuucaccgaaaaggg

SEQ ID NO: 9105 - RNA, 19 nt, Artificial Sequence
  Synthetic Oligonucleotide
gggcuuucaccaaagaggg

SEQ ID NO: 9106 - RNA, 19 nt, Artificial Sequence
  Synthetic Oligonucleotide
gggcuuucacagaagaggg

SEQ ID NO: 9107 - RNA, 19 nt, Artificial Sequence
  Synthetic Oligonucleotide
gggcuaucaccgaagaggg

SEQ ID NO: 9108 - RNA, 19 nt, Artificial Sequence
  Synthetic Oligonucleotide
gggcucucaccgaagaggg

SEQ ID NO: 9109 - RNA, 19 nt, Artificial Sequence
  Synthetic Oligonucleotide
gggccuucaccgaagaggg

SEQ ID NO: 9110 - RNA, 19 nt, Artificial Sequence
  Synthetic Oligonucleotide
gggguuucaccgaagaggg

SEQ ID NO: 9111 - RNA, 19 nt, Artificial Sequence
  Synthetic Oligonucleotide
gagcuuucaccgaagaggg

SEQ ID NO: 9112 - RNA, 19 nt, Artificial Sequence
  Synthetic Oligonucleotide
aggcuuucaccgaagaggg

SEQ ID NO: 9113 - RNA, 19 nt, Artificial Sequence
  Synthetic Oligonucleotide
gggccuucaccgaggaggg

SEQ ID NO: 9114 - RNA, 19 nt, Artificial Sequence
  Synthetic Oligonucleotide
gagcuuucacagaagaggg

SEQ ID NO: 9115 - RNA, 19 nt, Artificial Sequence
  Synthetic Oligonucleotide
gagcuuucacagaaggggg

SEQ ID NO: 9116 - RNA, 19 nt, Artificial Sequence
  Synthetic Oligonucleotide
gagcuuucacugaagaagg

SEQ ID NO: 9117 - RNA, 19 nt, Artificial Sequence
  Synthetic Oligonucleotide
gagcuuucacagaagaagg

SEQ ID NO: 9118 - RNA, 19 nt, Artificial Sequence
  Synthetic Oligonucleotide
gagcuuucacggaagaagg

SEQ ID NO: 9119 - RNA, 19 nt, Artificial Sequence
  Synthetic Oligonucleotide
ugaaagcgaauuuuagugu

SEQ ID NO: 9120 - RNA, 19 nt, Artificial Sequence
  Synthetic Oligonucleotide
ugaaggcgaauuucagugu

SEQ ID NO: 9121 - RNA, 19 nt, Artificial Sequence
  Synthetic Oligonucleotide
ugagagcgaauuucagugu

SEQ ID NO: 9122 - RNA, 19 nt, Artificial Sequence
  Synthetic Oligonucleotide
ugaaagcgaauuucaguau

SEQ ID NO: 9123 - RNA, 19 nt, Artificial Sequence
  Synthetic Oligonucleotide
ugaaagcgaauuucagcgu

SEQ ID NO: 9124 - RNA, 19 nt, Artificial Sequence
  Synthetic Oligonucleotide
ugaaagcgaauuucaaugu

SEQ ID NO: 9125 - RNA, 19 nt, Artificial Sequence
  Synthetic Oligonucleotide
ugaaagcgaauaucagugu

SEQ ID NO: 9126 - RNA, 19 nt, Artificial Sequence
  Synthetic Oligonucleotide
ugaaagcgaacuucagugu

SEQ ID NO: 9127 - RNA, 19 nt, Artificial Sequence
  Synthetic Oligonucleotide
ugaaagcaaauuucagugu

SEQ ID NO: 9128 - RNA, 19 nt, Artificial Sequence
  Synthetic Oligonucleotide
ugaaagcuaauuucagugu

SEQ ID NO: 9129 - RNA, 19 nt, Artificial Sequence
  Synthetic Oligonucleotide
uaaaagcgaauuucagugu

SEQ ID NO: 9130 - RNA, 19 nt, Artificial Sequence
  Synthetic Oligonucleotide
uuaaagcgaauuucagugu

SEQ ID NO: 9131 - RNA, 19 nt, Artificial Sequence
  Synthetic Oligonucleotide
ugaaagcaaacuucagugu

SEQ ID NO: 9132 - RNA, 19 nt, Artificial Sequence
  Synthetic Oligonucleotide
uaaaagcgaacuucagugu

SEQ ID NO: 9133 - RNA, 19 nt, Artificial Sequence
  Synthetic Oligonucleotide
ugaaagcaaacuuuagugu

SEQ ID NO: 9134 - RNA, 19 nt, Artificial Sequence
  Synthetic Oligonucleotide
ugaaggcaaacuucagugu

SEQ ID NO: 9135 - RNA, 19 nt, Artificial Sequence
  Synthetic Oligonucleotide
ugaaagcaaacuucagugc

SEQ ID NO: 9136 - RNA, 19 nt, Artificial Sequence
  Synthetic Oligonucleotide
uaagggcuuucaccgagga

SEQ ID NO: 9137 - RNA, 19 nt, Artificial Sequence
  Synthetic Oligonucleotide
uaagggcuuucacugaaga

SEQ ID NO: 9138 - RNA, 19 nt, Artificial Sequence
  Synthetic Oligonucleotide
uaagggcuuucaucgaaga

SEQ ID NO: 9139 - RNA, 19 nt, Artificial Sequence
  Synthetic Oligonucleotide
uaagggcuuuuaccgaaga

SEQ ID NO: 9140 - RNA, 19 nt, Artificial Sequence
  Synthetic Oligonucleotide
ugagggcuuucaccgaaga

SEQ ID NO: 9141 - RNA, 19 nt, Artificial Sequence
  Synthetic Oligonucleotide
uaagggcuuucacugagga

SEQ ID NO: 9142 - RNA, 19 nt, Artificial Sequence
  Synthetic Oligonucleotide
uaagggcuuucaccgaagc

SEQ ID NO: 9143 - RNA, 19 nt, Artificial Sequence
  Synthetic Oligonucleotide
uaagggcuuucaccgaaaa

SEQ ID NO: 9144 - RNA, 19 nt, Artificial Sequence
  Synthetic Oligonucleotide
uaagggcuuucaccaaaga

SEQ ID NO: 9145 - RNA, 19 nt, Artificial Sequence
  Synthetic Oligonucleotide
uaagggcuuucacagaaga

SEQ ID NO: 9146 - RNA, 19 nt, Artificial Sequence
  Synthetic Oligonucleotide
uaagggcuaucaccgaaga

SEQ ID NO: 9147 - RNA, 19 nt, Artificial Sequence
  Synthetic Oligonucleotide
uaagggcucucaccgaaga

SEQ ID NO: 9148 - RNA, 19 nt, Artificial Sequence
  Synthetic Oligonucleotide
uaagggccuucaccgaaga

SEQ ID NO: 9149 - RNA, 19 nt, Artificial Sequence
  Synthetic Oligonucleotide
uaagggguuucaccgaaga

SEQ ID NO: 9150 - RNA, 19 nt, Artificial Sequence
  Synthetic Oligonucleotide
uaagagcuuucaccgaaga

SEQ ID NO: 9151 - RNA, 19 nt, Artificial Sequence
  Synthetic Oligonucleotide
uaaaggcuuucaccgaaga

SEQ ID NO: 9152 - RNA, 19 nt, Artificial Sequence
  Synthetic Oligonucleotide
uuagggcuuucaccgaaga

SEQ ID NO: 9153 - RNA, 19 nt, Artificial Sequence
  Synthetic Oligonucleotide
aaagggcuuucaccgaaga

SEQ ID NO: 9154 - RNA, 19 nt, Artificial Sequence
  Synthetic Oligonucleotide
uaagggccuucaccgagga

SEQ ID NO: 9155 - RNA, 19 nt, Artificial Sequence
  Synthetic Oligonucleotide
ucagagcuuucacugaaga

SEQ ID NO: 9156 - RNA, 19 nt, Artificial Sequence
  Synthetic Oligonucleotide
uuagagcuuucacagaaga

SEQ ID NO: 9157 - RNA, 19 nt, Artificial Sequence
  Synthetic Oligonucleotide
uuagagcuuucacggaaga

SEQ ID NO: 9158 - RNA, 19 nt, Artificial Sequence
  Synthetic Oligonucleotide
uugaucggcuucgccggga

SEQ ID NO: 9159 - RNA, 19 nt, Artificial Sequence
  Synthetic Oligonucleotide
uugaucggcuucgucgaga

SEQ ID NO: 9160 - RNA, 19 nt, Artificial Sequence
  Synthetic Oligonucleotide
uugaucggcuucgccgawa

SEQ ID NO: 9161 - RNA, 19 nt, Artificial Sequence
  Synthetic Oligonucleotide
uugaucggcuucgccgaua

SEQ ID NO: 9162 - RNA, 19 nt, Artificial Sequence
  Synthetic Oligonucleotide
uugaucggcuucgcagaga

SEQ ID NO: 9163 - RNA, 19 nt, Artificial Sequence
  Synthetic Oligonucleotide
uugaucggcuucaccgaga

SEQ ID NO: 9164 - RNA, 19 nt, Artificial Sequence
  Synthetic Oligonucleotide
uugaucggcuuagccgaga

SEQ ID NO: 9165 - RNA, 19 nt, Artificial Sequence
  Synthetic Oligonucleotide
uugaucggcuccgccgaga

SEQ ID NO: 9166 - RNA, 19 nt, Artificial Sequence
  Synthetic Oligonucleotide
uugaucggauucgccgaga

SEQ ID NO: 9167 - RNA, 19 nt, Artificial Sequence
  Synthetic Oligonucleotide
uugaucgacuucgccgaga

SEQ ID NO: 9168 - RNA, 19 nt, Artificial Sequence
  Synthetic Oligonucleotide
uugauaggcuucgccgaga

SEQ ID NO: 9169 - RNA, 19 nt, Artificial Sequence
  Synthetic Oligonucleotide
uugaccggcuucgccgaga

SEQ ID NO: 9170 - RNA, 19 nt, Artificial Sequence
  Synthetic Oligonucleotide
ucgaucggcuucgccgaga

SEQ ID NO: 9171 - RNA, 19 nt, Artificial Sequence
  Synthetic Oligonucleotide
uugaccggcuucgucgaga

SEQ ID NO: 9172 - RNA, 19 nt, Artificial Sequence
  Synthetic Oligonucleotide
uugaucggcuucgccgaww

SEQ ID NO: 9173 - RNA, 19 nt, Artificial Sequence
  Synthetic Oligonucleotide
uugaucgacuucgcagaga

SEQ ID NO: 9174 - RNA, 19 nt, Artificial Sequence
  Synthetic Oligonucleotide
uugauagacuucgccgaga

SEQ ID NO: 9175 - RNA, 19 nt, Artificial Sequence
  Synthetic Oligonucleotide
uugaccggcuccgccggga

SEQ ID NO: 9176 - RNA, 19 nt, Artificial Sequence
  Synthetic Oligonucleotide
uugaccggguuugccgaga

SEQ ID NO: 9177 - RNA, 19 nt, Artificial Sequence
  Synthetic Oligonucleotide
uagaccggcuucgccggga

SEQ ID NO: 9178 - RNA, 19 nt, Artificial Sequence
  Synthetic Oligonucleotide
cuugaucggcuucgccggg

SEQ ID NO: 9179 - RNA, 19 nt, Artificial Sequence
  Synthetic Oligonucleotide
cuugaucggcuucgucgag

SEQ ID NO: 9180 - RNA, 19 nt, Artificial Sequence
  Synthetic Oligonucleotide
cuugaucggcuucgccgaw

SEQ ID NO: 9181 - RNA, 19 nt, Artificial Sequence
  Synthetic Oligonucleotide
cuugaucggcuucgccgau

SEQ ID NO: 9182 - RNA, 19 nt, Artificial Sequence
  Synthetic Oligonucleotide
cuugaucggcuucgcagag

SEQ ID NO: 9183 - RNA, 19 nt, Artificial Sequence
  Synthetic Oligonucleotide
cuugaucggcuucaccgag

SEQ ID NO: 9184 - RNA, 19 nt, Artificial Sequence
  Synthetic Oligonucleotide
cuugaucggcuuagccgag

SEQ ID NO: 9185 - RNA, 19 nt, Artificial Sequence
  Synthetic Oligonucleotide
cuugaucggcuccgccgag

SEQ ID NO: 9186 - RNA, 19 nt, Artificial Sequence
  Synthetic Oligonucleotide
cuugaucggauucgccgag

SEQ ID NO: 9187 - RNA, 19 nt, Artificial Sequence
  Synthetic Oligonucleotide
cuugaucgacuucgccgag

SEQ ID NO: 9188 - RNA, 19 nt, Artificial Sequence
  Synthetic Oligonucleotide
cuugauaggcuucgccgag

SEQ ID NO: 9189 - RNA, 19 nt, Artificial Sequence
  Synthetic Oligonucleotide
cuugaccggcuucgccgag

SEQ ID NO: 9190 - RNA, 19 nt, Artificial Sequence
  Synthetic Oligonucleotide
cucgaucggcuucgccgag

SEQ ID NO: 9191 - RNA, 19 nt, Artificial Sequence
  Synthetic Oligonucleotide
auugaucggcuucgccgag

SEQ ID NO: 9192 - RNA, 19 nt, Artificial Sequence
  Synthetic Oligonucleotide
cuugaccggcuucgucgag

SEQ ID NO: 9193 - RNA, 19 nt, Artificial Sequence
  Synthetic Oligonucleotide
cuugaucgacuucgcagag

SEQ ID NO: 9194 - RNA, 19 nt, Artificial Sequence
  Synthetic Oligonucleotide
cuugauagacuucgccgag

SEQ ID NO: 9195 - RNA, 19 nt, Artificial Sequence
  Synthetic Oligonucleotide
auugaccggcuucgccgag

SEQ ID NO: 9196 - RNA, 19 nt, Artificial Sequence
  Synthetic Oligonucleotide
cuugaccggcuccgccggg

SEQ ID NO: 9197 - RNA, 19 nt, Artificial Sequence
  Synthetic Oligonucleotide
cuugaccggguuugccgag

SEQ ID NO: 9198 - RNA, 19 nt, Artificial Sequence
  Synthetic Oligonucleotide
cuagaccggcuucgccggg

SEQ ID NO: 9199 - RNA, 19 nt, Artificial Sequence
  Synthetic Oligonucleotide
gaaagcgaauuuuagugug

SEQ ID NO: 9200 - RNA, 19 nt, Artificial Sequence
  Synthetic Oligonucleotide
gaaggcgaauuucagugug

SEQ ID NO: 9201 - RNA, 19 nt, Artificial Sequence
  Synthetic Oligonucleotide
gagagcgaauuucagugug

SEQ ID NO: 9202 - RNA, 19 nt, Artificial Sequence
  Synthetic Oligonucleotide
gaaagcgaauuucagugua

SEQ ID NO: 9203 - RNA, 19 nt, Artificial Sequence
  Synthetic Oligonucleotide
gaaagcgaauuucaguaug

SEQ ID NO: 9204 - RNA, 19 nt, Artificial Sequence
  Synthetic Oligonucleotide
gaaagcgaauuucagcgug

SEQ ID NO: 9205 - RNA, 19 nt, Artificial Sequence
  Synthetic Oligonucleotide
gaaagcgaauuucaaugug

SEQ ID NO: 9206 - RNA, 19 nt, Artificial Sequence
  Synthetic Oligonucleotide
gaaagcgaauaucagugug

SEQ ID NO: 9207 - RNA, 19 nt, Artificial Sequence
  Synthetic Oligonucleotide
gaaagcgaacuucagugug

SEQ ID NO: 9208 - RNA, 19 nt, Artificial Sequence
  Synthetic Oligonucleotide
gaaagcaaauuucagugug

SEQ ID NO: 9209 - RNA, 19 nt, Artificial Sequence
  Synthetic Oligonucleotide
gaaagcuaauuucagugug

SEQ ID NO: 9210 - RNA, 19 nt, Artificial Sequence
  Synthetic Oligonucleotide
aaaagcgaauuucagugug

SEQ ID NO: 9211 - RNA, 19 nt, Artificial Sequence
  Synthetic Oligonucleotide
uaaagcgaauuucagugug

SEQ ID NO: 9212 - RNA, 19 nt, Artificial Sequence
  Synthetic Oligonucleotide
gaaagcaaacuucagugug

SEQ ID NO: 9213 - RNA, 19 nt, Artificial Sequence
  Synthetic Oligonucleotide
aaaagcgaacuucagugug

SEQ ID NO: 9214 - RNA, 19 nt, Artificial Sequence
  Synthetic Oligonucleotide
gaaagcaaacuuuagugug

SEQ ID NO: 9215 - RNA, 19 nt, Artificial Sequence
  Synthetic Oligonucleotide
gaaggcaaacuucagugug

SEQ ID NO: 9216 - RNA, 19 nt, Artificial Sequence
  Synthetic Oligonucleotide
gaaagcaaacuucagugua

SEQ ID NO: 9217 - RNA, 19 nt, Artificial Sequence
  Synthetic Oligonucleotide
gaaagcaaacuucagugcg

SEQ ID NO: 9218 - RNA, 19 nt, Artificial Sequence
  Synthetic Oligonucleotide
aagggcuuucaccgaggag

SEQ ID NO: 9219 - RNA, 19 nt, Artificial Sequence
  Synthetic Oligonucleotide
aagggcuuucacugaagag

SEQ ID NO: 9220 - RNA, 19 nt, Artificial Sequence
  Synthetic Oligonucleotide
aagggcuuucaucgaagag

SEQ ID NO: 9221 - RNA, 19 nt, Artificial Sequence
  Synthetic Oligonucleotide
aagggcuuuuaccgaagag

SEQ ID NO: 9222 - RNA, 19 nt, Artificial Sequence
  Synthetic Oligonucleotide
gagggcuuucaccgaagag

SEQ ID NO: 9223 - RNA, 19 nt, Artificial Sequence
  Synthetic Oligonucleotide
aagggcuuucacugaggag

SEQ ID NO: 9224 - RNA, 19 nt, Artificial Sequence
  Synthetic Oligonucleotide
aagggcuuucaccgaagaa

SEQ ID NO: 9225 - RNA, 19 nt, Artificial Sequence
  Synthetic Oligonucleotide
aagggcuuucaccgaagau

SEQ ID NO: 9226 - RNA, 19 nt, Artificial Sequence
  Synthetic Oligonucleotide
aagggcuuucaccgaagcg

SEQ ID NO: 9227 - RNA, 19 nt, Artificial Sequence
  Synthetic Oligonucleotide
aagggcuuucaccgaaaag

SEQ ID NO: 9228 - RNA, 19 nt, Artificial Sequence
  Synthetic Oligonucleotide
aagggcuuucaccaaagag

SEQ ID NO: 9229 - RNA, 19 nt, Artificial Sequence
  Synthetic Oligonucleotide
aagggcuuucacagaagag

SEQ ID NO: 9230 - RNA, 19 nt, Artificial Sequence
  Synthetic Oligonucleotide
aagggcuaucaccgaagag

SEQ ID NO: 9231 - RNA, 19 nt, Artificial Sequence
  Synthetic Oligonucleotide
aagggcucucaccgaagag

SEQ ID NO: 9232 - RNA, 19 nt, Artificial Sequence
  Synthetic Oligonucleotide
aagggccuucaccgaagag

SEQ ID NO: 9233 - RNA, 19 nt, Artificial Sequence
  Synthetic Oligonucleotide
aagggguuucaccgaagag

SEQ ID NO: 9234 - RNA, 19 nt, Artificial Sequence
  Synthetic Oligonucleotide
aagagcuuucaccgaagag

SEQ ID NO: 9235 - RNA, 19 nt, Artificial Sequence
  Synthetic Oligonucleotide
aaaggcuuucaccgaagag

SEQ ID NO: 9236 - RNA, 19 nt, Artificial Sequence
  Synthetic Oligonucleotide
uagggcuuucaccgaagag

SEQ ID NO: 9237 - RNA, 19 nt, Artificial Sequence
  Synthetic Oligonucleotide
aagggccuucaccgaggag

SEQ ID NO: 9238 - RNA, 19 nt, Artificial Sequence
  Synthetic Oligonucleotide
uagagcuuucacagaagag

SEQ ID NO: 9239 - RNA, 19 nt, Artificial Sequence
  Synthetic Oligonucleotide
gaucggcuucgccgggauc

SEQ ID NO: 9240 - RNA, 19 nt, Artificial Sequence
  Synthetic Oligonucleotide
gaucggcuucgucgagauc

SEQ ID NO: 9241 - RNA, 19 nt, Artificial Sequence
  Synthetic Oligonucleotide
gaucggcuucgccgagaua

SEQ ID NO: 9242 - RNA, 19 nt, Artificial Sequence
  Synthetic Oligonucleotide
gaucggcuucgccgagacc

SEQ ID NO: 9243 - RNA, 19 nt, Artificial Sequence
  Synthetic Oligonucleotide
gaucggcuucgccgawauc

SEQ ID NO: 9244 - RNA, 19 nt, Artificial Sequence
  Synthetic Oligonucleotide
gaucggcuucgccgauauc

SEQ ID NO: 9245 - RNA, 19 nt, Artificial Sequence
  Synthetic Oligonucleotide
gaucggcuucgcagagauc

SEQ ID NO: 9246 - RNA, 19 nt, Artificial Sequence
  Synthetic Oligonucleotide
gaucggcuucaccgagauc

SEQ ID NO: 9247 - RNA, 19 nt, Artificial Sequence
  Synthetic Oligonucleotide
gaucggcuuagccgagauc

SEQ ID NO: 9248 - RNA, 19 nt, Artificial Sequence
  Synthetic Oligonucleotide
gaucggcuccgccgagauc

SEQ ID NO: 9249 - RNA, 19 nt, Artificial Sequence
  Synthetic Oligonucleotide
gaucggauucgccgagauc

SEQ ID NO: 9250 - RNA, 19 nt, Artificial Sequence
  Synthetic Oligonucleotide
gaucgacuucgccgagauc

SEQ ID NO: 9251 - RNA, 19 nt, Artificial Sequence
  Synthetic Oligonucleotide
gauaggcuucgccgagauc

SEQ ID NO: 9252 - RNA, 19 nt, Artificial Sequence
  Synthetic Oligonucleotide
gaccggcuucgccgagauc

SEQ ID NO: 9253 - RNA, 19 nt, Artificial Sequence
  Synthetic Oligonucleotide
gaccggcuucgccgggauc

SEQ ID NO: 9254 - RNA, 19 nt, Artificial Sequence
  Synthetic Oligonucleotide
gaccggcuucgucgagauc

SEQ ID NO: 9255 - RNA, 19 nt, Artificial Sequence
  Synthetic Oligonucleotide
gaucggcuucgccgawwuc

SEQ ID NO: 9256 - RNA, 19 nt, Artificial Sequence
  Synthetic Oligonucleotide
gaucgacuucgcagagauc

SEQ ID NO: 9257 - RNA, 19 nt, Artificial Sequence
  Synthetic Oligonucleotide
gauagacuucgccgagauc

SEQ ID NO: 9258 - RNA, 19 nt, Artificial Sequence
  Synthetic Oligonucleotide
gaccggcuucgccgagacc

SEQ ID NO: 9259 - RNA, 19 nt, Artificial Sequence
  Synthetic Oligonucleotide
gaccggcuccgccgggauc

SEQ ID NO: 9260 - RNA, 19 nt, Artificial Sequence
  Synthetic Oligonucleotide
gaccggguuugccgagauc

SEQ ID NO: 9261 - RNA, 19 nt, Artificial Sequence
  Synthetic Oligonucleotide
aucggcuucgccgggauca

SEQ ID NO: 9262 - RNA, 19 nt, Artificial Sequence
  Synthetic Oligonucleotide
aucggcuucgucgagauca

SEQ ID NO: 9263 - RNA, 19 nt, Artificial Sequence
  Synthetic Oligonucleotide
aucggcuucgccgagauaa

SEQ ID NO: 9264 - RNA, 19 nt, Artificial Sequence
  Synthetic Oligonucleotide
aucggcuucgccgagacca

SEQ ID NO: 9265 - RNA, 19 nt, Artificial Sequence
  Synthetic Oligonucleotide
aucggcuucgccgawauca

SEQ ID NO: 9266 - RNA, 19 nt, Artificial Sequence
  Synthetic Oligonucleotide
aucggcuucgccgauauca

SEQ ID NO: 9267 - RNA, 19 nt, Artificial Sequence
  Synthetic Oligonucleotide
aucggcuucgcagagauca

SEQ ID NO: 9268 - RNA, 19 nt, Artificial Sequence
  Synthetic Oligonucleotide
aucggcuucaccgagauca

SEQ ID NO: 9269 - RNA, 19 nt, Artificial Sequence
  Synthetic Oligonucleotide
aucggcuuagccgagauca

SEQ ID NO: 9270 - RNA, 19 nt, Artificial Sequence
  Synthetic Oligonucleotide
aucggcuccgccgagauca

SEQ ID NO: 9271 - RNA, 19 nt, Artificial Sequence
  Synthetic Oligonucleotide
aucggauucgccgagauca

SEQ ID NO: 9272 - RNA, 19 nt, Artificial Sequence
  Synthetic Oligonucleotide
aucgacuucgccgagauca

SEQ ID NO: 9273 - RNA, 19 nt, Artificial Sequence
  Synthetic Oligonucleotide
auaggcuucgccgagauca

SEQ ID NO: 9274 - RNA, 19 nt, Artificial Sequence
  Synthetic Oligonucleotide
accggcuucgccgagauca

SEQ ID NO: 9275 - RNA, 19 nt, Artificial Sequence
  Synthetic Oligonucleotide
accggcuucgccgggauca

SEQ ID NO: 9276 - RNA, 19 nt, Artificial Sequence
  Synthetic Oligonucleotide
accggcuucgucgagauca

SEQ ID NO: 9277 - RNA, 19 nt, Artificial Sequence
  Synthetic Oligonucleotide
aucggcuucgccgawwuca

SEQ ID NO: 9278 - RNA, 19 nt, Artificial Sequence
  Synthetic Oligonucleotide
aucggcuccgccgagaucu

SEQ ID NO: 9279 - RNA, 19 nt, Artificial Sequence
  Synthetic Oligonucleotide
aucgacuucgcagagauca

SEQ ID NO: 9280 - RNA, 19 nt, Artificial Sequence
  Synthetic Oligonucleotide
auagacuucgccgagauca

SEQ ID NO: 9281 - RNA, 19 nt, Artificial Sequence
  Synthetic Oligonucleotide
accggcuucgccgagacca

SEQ ID NO: 9282 - RNA, 19 nt, Artificial Sequence
  Synthetic Oligonucleotide
accggcuccgccgggauca

SEQ ID NO: 9283 - RNA, 19 nt, Artificial Sequence
  Synthetic Oligonucleotide
accggguuugccgagauca

SEQ ID NO: 9284 - RNA, 19 nt, Artificial Sequence
  Synthetic Oligonucleotide
cuaagggcuuucaccgagg

SEQ ID NO: 9285 - RNA, 19 nt, Artificial Sequence
  Synthetic Oligonucleotide
cuaagggcuuucacugaag

SEQ ID NO: 9286 - RNA, 19 nt, Artificial Sequence
  Synthetic Oligonucleotide
cuaagggcuuucaucgaag

SEQ ID NO: 9287 - RNA, 19 nt, Artificial Sequence
  Synthetic Oligonucleotide
cuaagggcuuuuaccgaag

SEQ ID NO: 9288 - RNA, 19 nt, Artificial Sequence
  Synthetic Oligonucleotide
cugagggcuuucaccgaag

SEQ ID NO: 9289 - RNA, 19 nt, Artificial Sequence
  Synthetic Oligonucleotide
uuaagggcuuucaccgaag

SEQ ID NO: 9290 - RNA, 19 nt, Artificial Sequence
  Synthetic Oligonucleotide
cuaagggcuuucacugagg

SEQ ID NO: 9291 - RNA, 19 nt, Artificial Sequence
  Synthetic Oligonucleotide
cuaagggcuuucaccgaaa

SEQ ID NO: 9292 - RNA, 19 nt, Artificial Sequence
  Synthetic Oligonucleotide
cuaagggcuuucaccaaag

SEQ ID NO: 9293 - RNA, 19 nt, Artificial Sequence
  Synthetic Oligonucleotide
cuaagggcuuucacagaag

SEQ ID NO: 9294 - RNA, 19 nt, Artificial Sequence
  Synthetic Oligonucleotide
cuaagggcuaucaccgaag

SEQ ID NO: 9295 - RNA, 19 nt, Artificial Sequence
  Synthetic Oligonucleotide
cuaagggcucucaccgaag

SEQ ID NO: 9296 - RNA, 19 nt, Artificial Sequence
  Synthetic Oligonucleotide
cuaagggccuucaccgaag

SEQ ID NO: 9297 - RNA, 19 nt, Artificial Sequence
  Synthetic Oligonucleotide
cuaagggguuucaccgaag

SEQ ID NO: 9298 - RNA, 19 nt, Artificial Sequence
  Synthetic Oligonucleotide
cuaagagcuuucaccgaag

SEQ ID NO: 9299 - RNA, 19 nt, Artificial Sequence
  Synthetic Oligonucleotide
cuaaaggcuuucaccgaag

SEQ ID NO: 9300 - RNA, 19 nt, Artificial Sequence
  Synthetic Oligonucleotide
cuuagggcuuucaccgaag

SEQ ID NO: 9301 - RNA, 19 nt, Artificial Sequence
  Synthetic Oligonucleotide
caaagggcuuucaccgaag

SEQ ID NO: 9302 - RNA, 19 nt, Artificial Sequence
  Synthetic Oligonucleotide
cuaagggccuucaccgagg

SEQ ID NO: 9303 - RNA, 19 nt, Artificial Sequence
  Synthetic Oligonucleotide
cucagagcuuucacugaag

SEQ ID NO: 9304 - RNA, 19 nt, Artificial Sequence
  Synthetic Oligonucleotide
cuuagagcuuucacagaag

SEQ ID NO: 9305 - RNA, 19 nt, Artificial Sequence
  Synthetic Oligonucleotide
cuuagagcuuucacggaag

SEQ ID NO: 9306 - RNA, 19 nt, Artificial Sequence
  Synthetic Oligonucleotide
ugaucggcuucgccgggau

SEQ ID NO: 9307 - RNA, 19 nt, Artificial Sequence
  Synthetic Oligonucleotide
ugaucggcuucgucgagau

SEQ ID NO: 9308 - RNA, 19 nt, Artificial Sequence
  Synthetic Oligonucleotide
ugaucggcuucgccgagac

SEQ ID NO: 9309 - RNA, 19 nt, Artificial Sequence
  Synthetic Oligonucleotide
ugaucggcuucgccgawau

SEQ ID NO: 9310 - RNA, 19 nt, Artificial Sequence
  Synthetic Oligonucleotide
ugaucggcuucgccgauau

SEQ ID NO: 9311 - RNA, 19 nt, Artificial Sequence
  Synthetic Oligonucleotide
ugaucggcuucgcagagau

SEQ ID NO: 9312 - RNA, 19 nt, Artificial Sequence
  Synthetic Oligonucleotide
ugaucggcuucaccgagau

SEQ ID NO: 9313 - RNA, 19 nt, Artificial Sequence
  Synthetic Oligonucleotide
ugaucggcuuagccgagau

SEQ ID NO: 9314 - RNA, 19 nt, Artificial Sequence
  Synthetic Oligonucleotide
ugaucggcuccgccgagau

SEQ ID NO: 9315 - RNA, 19 nt, Artificial Sequence
  Synthetic Oligonucleotide
ugaucggauucgccgagau

SEQ ID NO: 9316 - RNA, 19 nt, Artificial Sequence
  Synthetic Oligonucleotide
ugaucgacuucgccgagau

SEQ ID NO: 9317 - RNA, 19 nt, Artificial Sequence
  Synthetic Oligonucleotide
ugauaggcuucgccgagau

SEQ ID NO: 9318 - RNA, 19 nt, Artificial Sequence
  Synthetic Oligonucleotide
ugaccggcuucgccgagau

SEQ ID NO: 9319 - RNA, 19 nt, Artificial Sequence
  Synthetic Oligonucleotide
cgaucggcuucgccgagau

SEQ ID NO: 9320 - RNA, 19 nt, Artificial Sequence
  Synthetic Oligonucleotide
ugaccggcuucgucgagau

SEQ ID NO: 9321 - RNA, 19 nt, Artificial Sequence
  Synthetic Oligonucleotide
ugaucggcuucgccgawwu

SEQ ID NO: 9322 - RNA, 19 nt, Artificial Sequence
  Synthetic Oligonucleotide
ugaucgacuucgcagagau

SEQ ID NO: 9323 - RNA, 19 nt, Artificial Sequence
  Synthetic Oligonucleotide
ugauagacuucgccgagau

SEQ ID NO: 9324 - RNA, 19 nt, Artificial Sequence
  Synthetic Oligonucleotide
ugaccggcuucgccgagac

SEQ ID NO: 9325 - RNA, 19 nt, Artificial Sequence
  Synthetic Oligonucleotide
ugaccggcuccgccgggau

SEQ ID NO: 9326 - RNA, 19 nt, Artificial Sequence
  Synthetic Oligonucleotide
ugaccggguuugccgagau

SEQ ID NO: 9327 - RNA, 19 nt, Artificial Sequence
  Synthetic Oligonucleotide
agaccggcuucgccgggau

SEQ ID NO: 9328 - RNA, 19 nt, Artificial Sequence
  Synthetic Oligonucleotide
ugcaauugggguccucguc

SEQ ID NO: 9329 - RNA, 19 nt, Artificial Sequence
  Synthetic Oligonucleotide
ugcaauugggguucucauc

SEQ ID NO: 9330 - RNA, 19 nt, Artificial Sequence
  Synthetic Oligonucleotide
ugcaguugggguccucauc

SEQ ID NO: 9331 - RNA, 19 nt, Artificial Sequence
  Synthetic Oligonucleotide
ugcgauugggguccucauc

SEQ ID NO: 9332 - RNA, 19 nt, Artificial Sequence
  Synthetic Oligonucleotide
ugcaauugggguccucacc

SEQ ID NO: 9333 - RNA, 19 nt, Artificial Sequence
  Synthetic Oligonucleotide
ugcaauugggauccucauc

SEQ ID NO: 9334 - RNA, 19 nt, Artificial Sequence
  Synthetic Oligonucleotide
ugcaauugggcuccucauc

SEQ ID NO: 9335 - RNA, 19 nt, Artificial Sequence
  Synthetic Oligonucleotide
ugcaauuggaguccucauc

SEQ ID NO: 9336 - RNA, 19 nt, Artificial Sequence
  Synthetic Oligonucleotide
ugcaauuggcguccucauc

SEQ ID NO: 9337 - RNA, 19 nt, Artificial Sequence
  Synthetic Oligonucleotide
ugcaauuaggguccucauc

SEQ ID NO: 9338 - RNA, 19 nt, Artificial Sequence
  Synthetic Oligonucleotide
ugcaauugggauucucauc

SEQ ID NO: 9339 - RNA, 19 nt, Artificial Sequence
  Synthetic Oligonucleotide
ugcaguuggaguccucauc

SEQ ID NO: 9340 - RNA, 19 nt, Artificial Sequence
  Synthetic Oligonucleotide
ugcaguuggcguccucauc

SEQ ID NO: 9341 - RNA, 19 nt, Artificial Sequence
  Synthetic Oligonucleotide
ugcaauugggacccucauc

SEQ ID NO: 9342 - RNA, 19 nt, Artificial Sequence
  Synthetic Oligonucleotide
ugcaauuggauuccucauc

SEQ ID NO: 9343 - RNA, 19 nt, Artificial Sequence
  Synthetic Oligonucleotide
gcaauugggguccucgucg

SEQ ID NO: 9344 - RNA, 19 nt, Artificial Sequence
  Synthetic Oligonucleotide
gcaauugggguucucaucg

SEQ ID NO: 9345 - RNA, 19 nt, Artificial Sequence
  Synthetic Oligonucleotide
gcaguugggguccucaucg

SEQ ID NO: 9346 - RNA, 19 nt, Artificial Sequence
  Synthetic Oligonucleotide
gcgauugggguccucaucg

SEQ ID NO: 9347 - RNA, 19 nt, Artificial Sequence
  Synthetic Oligonucleotide
gcaauugggguccucauca

SEQ ID NO: 9348 - RNA, 19 nt, Artificial Sequence
  Synthetic Oligonucleotide
gcaauugggguccucaccg

SEQ ID NO: 9349 - RNA, 19 nt, Artificial Sequence
  Synthetic Oligonucleotide
gcaauugggauccucaucg

SEQ ID NO: 9350 - RNA, 19 nt, Artificial Sequence
  Synthetic Oligonucleotide
gcaauugggcuccucaucg

SEQ ID NO: 9351 - RNA, 19 nt, Artificial Sequence
  Synthetic Oligonucleotide
gcaauuggaguccucaucg

SEQ ID NO: 9352 - RNA, 19 nt, Artificial Sequence
  Synthetic Oligonucleotide
gcaauuggcguccucaucg

SEQ ID NO: 9353 - RNA, 19 nt, Artificial Sequence
  Synthetic Oligonucleotide
gcaauuaggguccucaucg

SEQ ID NO: 9354 - RNA, 19 nt, Artificial Sequence
  Synthetic Oligonucleotide
gcaauugggauucucaucg

SEQ ID NO: 9355 - RNA, 19 nt, Artificial Sequence
  Synthetic Oligonucleotide
gcaguuggaguccucaucg

SEQ ID NO: 9356 - RNA, 19 nt, Artificial Sequence
  Synthetic Oligonucleotide
gcaguuggcguccucaucg

SEQ ID NO: 9357 - RNA, 19 nt, Artificial Sequence
  Synthetic Oligonucleotide
gcaauugggauccucauca

SEQ ID NO: 9358 - RNA, 19 nt, Artificial Sequence
  Synthetic Oligonucleotide
gcaauugggacccucaucg

SEQ ID NO: 9359 - RNA, 19 nt, Artificial Sequence
  Synthetic Oligonucleotide
gcaauuggauuccucaucg

SEQ ID NO: 9360 - RNA, 19 nt, Artificial Sequence
  Synthetic Oligonucleotide
gcaauugggacccucauca

SEQ ID NO: 9361 - RNA, 19 nt, Artificial Sequence
  Synthetic Oligonucleotide
caauugggguccucgucgg

SEQ ID NO: 9362 - RNA, 19 nt, Artificial Sequence
  Synthetic Oligonucleotide
caauugggguucucaucgg

SEQ ID NO: 9363 - RNA, 19 nt, Artificial Sequence
  Synthetic Oligonucleotide
caguugggguccucaucgg

SEQ ID NO: 9364 - RNA, 19 nt, Artificial Sequence
  Synthetic Oligonucleotide
cgauugggguccucaucgg

SEQ ID NO: 9365 - RNA, 19 nt, Artificial Sequence
  Synthetic Oligonucleotide
caauugggguccucaucag

SEQ ID NO: 9366 - RNA, 19 nt, Artificial Sequence
  Synthetic Oligonucleotide
caauugggguccucaccgg

SEQ ID NO: 9367 - RNA, 19 nt, Artificial Sequence
  Synthetic Oligonucleotide
caauugggauccucaucgg

SEQ ID NO: 9368 - RNA, 19 nt, Artificial Sequence
  Synthetic Oligonucleotide
caauugggcuccucaucgg

SEQ ID NO: 9369 - RNA, 19 nt, Artificial Sequence
  Synthetic Oligonucleotide
caauuggaguccucaucgg

SEQ ID NO: 9370 - RNA, 19 nt, Artificial Sequence
  Synthetic Oligonucleotide
caauuggcguccucaucgg

SEQ ID NO: 9371 - RNA, 19 nt, Artificial Sequence
  Synthetic Oligonucleotide
caauuaggguccucaucgg

SEQ ID NO: 9372 - RNA, 19 nt, Artificial Sequence
  Synthetic Oligonucleotide
caauugggauucucaucgg

SEQ ID NO: 9373 - RNA, 19 nt, Artificial Sequence
  Synthetic Oligonucleotide
caguuggaguccucaucgg

SEQ ID NO: 9374 - RNA, 19 nt, Artificial Sequence
  Synthetic Oligonucleotide
caguuggcguccucaucgg

SEQ ID NO: 9375 - RNA, 19 nt, Artificial Sequence
  Synthetic Oligonucleotide
caauugggacccucaucgg

SEQ ID NO: 9376 - RNA, 19 nt, Artificial Sequence
  Synthetic Oligonucleotide
caauuggauuccucaucgg

SEQ ID NO: 9377 - RNA, 19 nt, Artificial Sequence
  Synthetic Oligonucleotide
caauugggauccucaucaa

SEQ ID NO: 9378 - RNA, 19 nt, Artificial Sequence
  Synthetic Oligonucleotide
ucggcuucgccgggaucag

SEQ ID NO: 9379 - RNA, 19 nt, Artificial Sequence
  Synthetic Oligonucleotide
ucggcuucgucgagaucag

SEQ ID NO: 9380 - RNA, 19 nt, Artificial Sequence
  Synthetic Oligonucleotide
ucggcuucgccgagaucaa

SEQ ID NO: 9381 - RNA, 19 nt, Artificial Sequence
  Synthetic Oligonucleotide
ucggcuucgccgagauaag

SEQ ID NO: 9382 - RNA, 19 nt, Artificial Sequence
  Synthetic Oligonucleotide
ucggcuucgccgagaccag

SEQ ID NO: 9383 - RNA, 19 nt, Artificial Sequence
  Synthetic Oligonucleotide
ucggcuucgccgawaucag

SEQ ID NO: 9384 - RNA, 19 nt, Artificial Sequence
  Synthetic Oligonucleotide
ucggcuucgccgauaucag

SEQ ID NO: 9385 - RNA, 19 nt, Artificial Sequence
  Synthetic Oligonucleotide
ucggcuucgcagagaucag

SEQ ID NO: 9386 - RNA, 19 nt, Artificial Sequence
  Synthetic Oligonucleotide
ucggcuucaccgagaucag

SEQ ID NO: 9387 - RNA, 19 nt, Artificial Sequence
  Synthetic Oligonucleotide
ucggcuuagccgagaucag

SEQ ID NO: 9388 - RNA, 19 nt, Artificial Sequence
  Synthetic Oligonucleotide
ucggcuccgccgagaucag

SEQ ID NO: 9389 - RNA, 19 nt, Artificial Sequence
  Synthetic Oligonucleotide
ucggauucgccgagaucag

SEQ ID NO: 9390 - RNA, 19 nt, Artificial Sequence
  Synthetic Oligonucleotide
ucgacuucgccgagaucag

SEQ ID NO: 9391 - RNA, 19 nt, Artificial Sequence
  Synthetic Oligonucleotide
uaggcuucgccgagaucag

SEQ ID NO: 9392 - RNA, 19 nt, Artificial Sequence
  Synthetic Oligonucleotide
ccggcuucgccgagaucag

SEQ ID NO: 9393 - RNA, 19 nt, Artificial Sequence
  Synthetic Oligonucleotide
ccggcuucgccgggaucag

SEQ ID NO: 9394 - RNA, 19 nt, Artificial Sequence
  Synthetic Oligonucleotide
ccggcuucgucgagaucag

SEQ ID NO: 9395 - RNA, 19 nt, Artificial Sequence
  Synthetic Oligonucleotide
ucggcuucgccgawwucag

SEQ ID NO: 9396 - RNA, 19 nt, Artificial Sequence
  Synthetic Oligonucleotide
ucggcuccgccgagaucaa

SEQ ID NO: 9397 - RNA, 19 nt, Artificial Sequence
  Synthetic Oligonucleotide
ucgacuucgcagagaucag

SEQ ID NO: 9398 - RNA, 19 nt, Artificial Sequence
  Synthetic Oligonucleotide
uagacuucgccgagaucag

SEQ ID NO: 9399 - RNA, 19 nt, Artificial Sequence
  Synthetic Oligonucleotide
ccggcuucgccgagaucaa

SEQ ID NO: 9400 - RNA, 19 nt, Artificial Sequence
  Synthetic Oligonucleotide
ccggguuugccgagaucag

SEQ ID NO: 9401 - RNA, 19 nt, Artificial Sequence
  Synthetic Oligonucleotide
ucggcuccgccgagaucuc

SEQ ID NO: 9402 - RNA, 19 nt, Artificial Sequence
  Synthetic Oligonucleotide
ccggcuucgccgagaccaa

SEQ ID NO: 9403 - RNA, 19 nt, Artificial Sequence
  Synthetic Oligonucleotide
gcuuucaccgaagaggggg

SEQ ID NO: 9404 - RNA, 19 nt, Artificial Sequence
  Synthetic Oligonucleotide
gcuuucaccgaggagggag

SEQ ID NO: 9405 - RNA, 19 nt, Artificial Sequence
  Synthetic Oligonucleotide
gcuuucacugaagagggag

SEQ ID NO: 9406 - RNA, 19 nt, Artificial Sequence
  Synthetic Oligonucleotide
gcuuucaucgaagagggag

SEQ ID NO: 9407 - RNA, 19 nt, Artificial Sequence
  Synthetic Oligonucleotide
gcuuuuaccgaagagggag

SEQ ID NO: 9408 - RNA, 19 nt, Artificial Sequence
  Synthetic Oligonucleotide
gcuuucacugaggagggag

SEQ ID NO: 9409 - RNA, 19 nt, Artificial Sequence
  Synthetic Oligonucleotide
gcuuucaccgaagagggaa

SEQ ID NO: 9410 - RNA, 19 nt, Artificial Sequence
  Synthetic Oligonucleotide
gcuuucaccgaagagggac

SEQ ID NO: 9411 - RNA, 19 nt, Artificial Sequence
  Synthetic Oligonucleotide
gcuuucaccgaagagggcg

SEQ ID NO: 9412 - RNA, 19 nt, Artificial Sequence
  Synthetic Oligonucleotide
gcuuucaccgaagagggug

SEQ ID NO: 9413 - RNA, 19 nt, Artificial Sequence
  Synthetic Oligonucleotide
gcuuucaccgaagaggaag

SEQ ID NO: 9414 - RNA, 19 nt, Artificial Sequence
  Synthetic Oligonucleotide
gcuuucaccgaagaaggag

SEQ ID NO: 9415 - RNA, 19 nt, Artificial Sequence
  Synthetic Oligonucleotide
gcuuucaccgaagauggag

SEQ ID NO: 9416 - RNA, 19 nt, Artificial Sequence
  Synthetic Oligonucleotide
gcuuucaccgaagcgggag

SEQ ID NO: 9417 - RNA, 19 nt, Artificial Sequence
  Synthetic Oligonucleotide
gcuuucaccgaaaagggag

SEQ ID NO: 9418 - RNA, 19 nt, Artificial Sequence
  Synthetic Oligonucleotide
gcuuucaccaaagagggag

SEQ ID NO: 9419 - RNA, 19 nt, Artificial Sequence
  Synthetic Oligonucleotide
gcuuucacagaagagggag

SEQ ID NO: 9420 - RNA, 19 nt, Artificial Sequence
  Synthetic Oligonucleotide
gcuaucaccgaagagggag

SEQ ID NO: 9421 - RNA, 19 nt, Artificial Sequence
  Synthetic Oligonucleotide
gcucucaccgaagagggag

SEQ ID NO: 9422 - RNA, 19 nt, Artificial Sequence
  Synthetic Oligonucleotide
gccuucaccgaagagggag

SEQ ID NO: 9423 - RNA, 19 nt, Artificial Sequence
  Synthetic Oligonucleotide
gguuucaccgaagagggag

SEQ ID NO: 9424 - RNA, 19 nt, Artificial Sequence
  Synthetic Oligonucleotide
gcuuucacagaagggggag

SEQ ID NO: 9425 - RNA, 19 nt, Artificial Sequence
  Synthetic Oligonucleotide
gcuuucacugaagaaggag

SEQ ID NO: 9426 - RNA, 19 nt, Artificial Sequence
  Synthetic Oligonucleotide
gccuucaccgaggagggag

SEQ ID NO: 9427 - RNA, 19 nt, Artificial Sequence
  Synthetic Oligonucleotide
gcuuucacagaagaaggag

SEQ ID NO: 9428 - RNA, 19 nt, Artificial Sequence
  Synthetic Oligonucleotide
gccuucaccgaagagggaa

SEQ ID NO: 9429 - RNA, 19 nt, Artificial Sequence
  Synthetic Oligonucleotide
gcuuucacagaagaagggg

SEQ ID NO: 9430 - RNA, 19 nt, Artificial Sequence
  Synthetic Oligonucleotide
gcuuucacagaaggaggag

SEQ ID NO: 9431 - RNA, 19 nt, Artificial Sequence
  Synthetic Oligonucleotide
gcuuucacggaagaagggg

SEQ ID NO: 9432 - RNA, 19 nt, Artificial Sequence
  Synthetic Oligonucleotide
gccuucaccgaagagggga

SEQ ID NO: 9433 - RNA, 19 nt, Artificial Sequence
  Synthetic Oligonucleotide
ggcuuucaccgaagagggg

SEQ ID NO: 9434 - RNA, 19 nt, Artificial Sequence
  Synthetic Oligonucleotide
ggcuuucaccgaggaggga

SEQ ID NO: 9435 - RNA, 19 nt, Artificial Sequence
  Synthetic Oligonucleotide
ggcuuucacugaagaggga

SEQ ID NO: 9436 - RNA, 19 nt, Artificial Sequence
  Synthetic Oligonucleotide
ggcuuucaucgaagaggga

SEQ ID NO: 9437 - RNA, 19 nt, Artificial Sequence
  Synthetic Oligonucleotide
ggcuuuuaccgaagaggga

SEQ ID NO: 9438 - RNA, 19 nt, Artificial Sequence
  Synthetic Oligonucleotide
ggcuuucacugaggaggga

SEQ ID NO: 9439 - RNA, 19 nt, Artificial Sequence
  Synthetic Oligonucleotide
ggcuuucaccgaagagggc

SEQ ID NO: 9440 - RNA, 19 nt, Artificial Sequence
  Synthetic Oligonucleotide
ggcuuucaccgaagagggu

SEQ ID NO: 9441 - RNA, 19 nt, Artificial Sequence
  Synthetic Oligonucleotide
ggcuuucaccgaagaggaa

SEQ ID NO: 9442 - RNA, 19 nt, Artificial Sequence
  Synthetic Oligonucleotide
ggcuuucaccgaagaagga

SEQ ID NO: 9443 - RNA, 19 nt, Artificial Sequence
  Synthetic Oligonucleotide
ggcuuucaccgaagaugga

SEQ ID NO: 9444 - RNA, 19 nt, Artificial Sequence
  Synthetic Oligonucleotide
ggcuuucaccgaagcggga

SEQ ID NO: 9445 - RNA, 19 nt, Artificial Sequence
  Synthetic Oligonucleotide
ggcuuucaccgaaaaggga

SEQ ID NO: 9446 - RNA, 19 nt, Artificial Sequence
  Synthetic Oligonucleotide
ggcuuucaccaaagaggga

SEQ ID NO: 9447 - RNA, 19 nt, Artificial Sequence
  Synthetic Oligonucleotide
ggcuuucacagaagaggga

SEQ ID NO: 9448 - RNA, 19 nt, Artificial Sequence
  Synthetic Oligonucleotide
ggcuaucaccgaagaggga

SEQ ID NO: 9449 - RNA, 19 nt, Artificial Sequence
  Synthetic Oligonucleotide
ggcucucaccgaagaggga

SEQ ID NO: 9450 - RNA, 19 nt, Artificial Sequence
  Synthetic Oligonucleotide
ggccuucaccgaagaggga

SEQ ID NO: 9451 - RNA, 19 nt, Artificial Sequence
  Synthetic Oligonucleotide
ggguuucaccgaagaggga

SEQ ID NO: 9452 - RNA, 19 nt, Artificial Sequence
  Synthetic Oligonucleotide
agcuuucaccgaagaggga

SEQ ID NO: 9453 - RNA, 19 nt, Artificial Sequence
  Synthetic Oligonucleotide
ggccuucaccgaagagggg

SEQ ID NO: 9454 - RNA, 19 nt, Artificial Sequence
  Synthetic Oligonucleotide
ggccuucaccgaggaggga

SEQ ID NO: 9455 - RNA, 19 nt, Artificial Sequence
  Synthetic Oligonucleotide
agcuuucacagaagaggga

SEQ ID NO: 9456 - RNA, 19 nt, Artificial Sequence
  Synthetic Oligonucleotide
agcuuucacagaaggggga

SEQ ID NO: 9457 - RNA, 19 nt, Artificial Sequence
  Synthetic Oligonucleotide
agcuuucacugaagaagga

SEQ ID NO: 9458 - RNA, 19 nt, Artificial Sequence
  Synthetic Oligonucleotide
agcuuucacagaagaagga

SEQ ID NO: 9459 - RNA, 19 nt, Artificial Sequence
  Synthetic Oligonucleotide
ucaaaaaugcaguuggggu

SEQ ID NO: 9460 - RNA, 19 nt, Artificial Sequence
  Synthetic Oligonucleotide
ucaaaaaugcgauuggggu

SEQ ID NO: 9461 - RNA, 19 nt, Artificial Sequence
  Synthetic Oligonucleotide
ucaaagaugcaauuggggu

SEQ ID NO: 9462 - RNA, 19 nt, Artificial Sequence
  Synthetic Oligonucleotide
ucaaagaugcaguuggggu

SEQ ID NO: 9463 - RNA, 19 nt, Artificial Sequence
  Synthetic Oligonucleotide
ucaaaaaugcaauugggau

SEQ ID NO: 9464 - RNA, 19 nt, Artificial Sequence
  Synthetic Oligonucleotide
ucaaaaaugcaauugggcu

SEQ ID NO: 9465 - RNA, 19 nt, Artificial Sequence
  Synthetic Oligonucleotide
ucaaaaaugcaauuggagu

SEQ ID NO: 9466 - RNA, 19 nt, Artificial Sequence
  Synthetic Oligonucleotide
ucaaaaaugcaauuggcgu

SEQ ID NO: 9467 - RNA, 19 nt, Artificial Sequence
  Synthetic Oligonucleotide
ucaaaaaugcaauuagggu

SEQ ID NO: 9468 - RNA, 19 nt, Artificial Sequence
  Synthetic Oligonucleotide
ucaaaauugcaauuggggu

SEQ ID NO: 9469 - RNA, 19 nt, Artificial Sequence
  Synthetic Oligonucleotide
ucaaaaaugcaguuggagu

SEQ ID NO: 9470 - RNA, 19 nt, Artificial Sequence
  Synthetic Oligonucleotide
ucaaaaaugcaguuggcgu

SEQ ID NO: 9471 - RNA, 19 nt, Artificial Sequence
  Synthetic Oligonucleotide
ucaaaagugcaauuggcgu

SEQ ID NO: 9472 - RNA, 19 nt, Artificial Sequence
  Synthetic Oligonucleotide
ucaaaaaugcaauugggac

SEQ ID NO: 9473 - RNA, 19 nt, Artificial Sequence
  Synthetic Oligonucleotide
ucaaaaaugcaauuggauu

SEQ ID NO: 9474 - RNA, 19 nt, Artificial Sequence
  Synthetic Oligonucleotide
gucaaaaaugcaguugggg

SEQ ID NO: 9475 - RNA, 19 nt, Artificial Sequence
  Synthetic Oligonucleotide
gucaaaaaugcgauugggg

SEQ ID NO: 9476 - RNA, 19 nt, Artificial Sequence
  Synthetic Oligonucleotide
gucaaagaugcaauugggg

SEQ ID NO: 9477 - RNA, 19 nt, Artificial Sequence
  Synthetic Oligonucleotide
gucaaagaugcaguugggg

SEQ ID NO: 9478 - RNA, 19 nt, Artificial Sequence
  Synthetic Oligonucleotide
gucaaaaaugcaauuggga

SEQ ID NO: 9479 - RNA, 19 nt, Artificial Sequence
  Synthetic Oligonucleotide
gucaaaaaugcaauugggc

SEQ ID NO: 9480 - RNA, 19 nt, Artificial Sequence
  Synthetic Oligonucleotide
gucaaaaaugcaauuggag

SEQ ID NO: 9481 - RNA, 19 nt, Artificial Sequence
  Synthetic Oligonucleotide
gucaaaaaugcaauuggcg

SEQ ID NO: 9482 - RNA, 19 nt, Artificial Sequence
  Synthetic Oligonucleotide
gucaaaaaugcaauuaggg

SEQ ID NO: 9483 - RNA, 19 nt, Artificial Sequence
  Synthetic Oligonucleotide
gucaaaauugcaauugggg

SEQ ID NO: 9484 - RNA, 19 nt, Artificial Sequence
  Synthetic Oligonucleotide
gucaaaaaugcaguuggag

SEQ ID NO: 9485 - RNA, 19 nt, Artificial Sequence
  Synthetic Oligonucleotide
gucaaaaaugcaguuggcg

SEQ ID NO: 9486 - RNA, 19 nt, Artificial Sequence
  Synthetic Oligonucleotide
gucaaaagugcaauuggcg

SEQ ID NO: 9487 - RNA, 19 nt, Artificial Sequence
  Synthetic Oligonucleotide
gucaaaaaugcaauuggau

SEQ ID NO: 9488 - RNA, 19 nt, Artificial Sequence
  Synthetic Oligonucleotide
aucaaaaaugcaauuggcg

SEQ ID NO: 9489 - RNA, 19 nt, Artificial Sequence
  Synthetic Oligonucleotide
aaaugcaauugggguucuc

SEQ ID NO: 9490 - RNA, 19 nt, Artificial Sequence
  Synthetic Oligonucleotide
aaaugcaguugggguccuc

SEQ ID NO: 9491 - RNA, 19 nt, Artificial Sequence
  Synthetic Oligonucleotide
aaaugcgauugggguccuc

SEQ ID NO: 9492 - RNA, 19 nt, Artificial Sequence
  Synthetic Oligonucleotide
agaugcaauugggguccuc

SEQ ID NO: 9493 - RNA, 19 nt, Artificial Sequence
  Synthetic Oligonucleotide
agaugcaguugggguccuc

SEQ ID NO: 9494 - RNA, 19 nt, Artificial Sequence
  Synthetic Oligonucleotide
aaaugcaauugggauccuc

SEQ ID NO: 9495 - RNA, 19 nt, Artificial Sequence
  Synthetic Oligonucleotide
aaaugcaauugggcuccuc

SEQ ID NO: 9496 - RNA, 19 nt, Artificial Sequence
  Synthetic Oligonucleotide
aaaugcaauuggaguccuc

SEQ ID NO: 9497 - RNA, 19 nt, Artificial Sequence
  Synthetic Oligonucleotide
aaaugcaauuggcguccuc

SEQ ID NO: 9498 - RNA, 19 nt, Artificial Sequence
  Synthetic Oligonucleotide
aaaugcaauuaggguccuc

SEQ ID NO: 9499 - RNA, 19 nt, Artificial Sequence
  Synthetic Oligonucleotide
aauugcaauugggguccuc

SEQ ID NO: 9500 - RNA, 19 nt, Artificial Sequence
  Synthetic Oligonucleotide
aaaugcaauugggauucuc

SEQ ID NO: 9501 - RNA, 19 nt, Artificial Sequence
  Synthetic Oligonucleotide
aaaugcaguuggaguccuc

SEQ ID NO: 9502 - RNA, 19 nt, Artificial Sequence
  Synthetic Oligonucleotide
aaaugcaguuggcguccuc

SEQ ID NO: 9503 - RNA, 19 nt, Artificial Sequence
  Synthetic Oligonucleotide
aagugcaauuggcguccuc

SEQ ID NO: 9504 - RNA, 19 nt, Artificial Sequence
  Synthetic Oligonucleotide
aaaugcaauugggacccuc

SEQ ID NO: 9505 - RNA, 19 nt, Artificial Sequence
  Synthetic Oligonucleotide
aaaugcaauuggauuccuc

SEQ ID NO: 9506 - RNA, 19 nt, Artificial Sequence
  Synthetic Oligonucleotide
aaaaugcaauugggguucu

SEQ ID NO: 9507 - RNA, 19 nt, Artificial Sequence
  Synthetic Oligonucleotide
aaaaugcaguugggguccu

SEQ ID NO: 9508 - RNA, 19 nt, Artificial Sequence
  Synthetic Oligonucleotide
aaaaugcgauugggguccu

SEQ ID NO: 9509 - RNA, 19 nt, Artificial Sequence
  Synthetic Oligonucleotide
aagaugcaauugggguccu

SEQ ID NO: 9510 - RNA, 19 nt, Artificial Sequence
  Synthetic Oligonucleotide
aagaugcaguugggguccu

SEQ ID NO: 9511 - RNA, 19 nt, Artificial Sequence
  Synthetic Oligonucleotide
aaaaugcaauugggauccu

SEQ ID NO: 9512 - RNA, 19 nt, Artificial Sequence
  Synthetic Oligonucleotide
aaaaugcaauugggcuccu

SEQ ID NO: 9513 - RNA, 19 nt, Artificial Sequence
  Synthetic Oligonucleotide
aaaaugcaauuggaguccu

SEQ ID NO: 9514 - RNA, 19 nt, Artificial Sequence
  Synthetic Oligonucleotide
aaaaugcaauuggcguccu

SEQ ID NO: 9515 - RNA, 19 nt, Artificial Sequence
  Synthetic Oligonucleotide
aaaaugcaauuaggguccu

SEQ ID NO: 9516 - RNA, 19 nt, Artificial Sequence
  Synthetic Oligonucleotide
aaauugcaauugggguccu

SEQ ID NO: 9517 - RNA, 19 nt, Artificial Sequence
  Synthetic Oligonucleotide
aaaaugcaauugggauucu

SEQ ID NO: 9518 - RNA, 19 nt, Artificial Sequence
  Synthetic Oligonucleotide
aaaaugcaguuggaguccu

SEQ ID NO: 9519 - RNA, 19 nt, Artificial Sequence
  Synthetic Oligonucleotide
aaaaugcaguuggcguccu

SEQ ID NO: 9520 - RNA, 19 nt, Artificial Sequence
  Synthetic Oligonucleotide
aaagugcaauuggcguccu

SEQ ID NO: 9521 - RNA, 19 nt, Artificial Sequence
  Synthetic Oligonucleotide
aaaaugcaauugggacccu

SEQ ID NO: 9522 - RNA, 19 nt, Artificial Sequence
  Synthetic Oligonucleotide
aaaaugcaauuggauuccu

SEQ ID NO: 9523 - RNA, 19 nt, Artificial Sequence
  Synthetic Oligonucleotide
caaaaaugcaauugggguu

SEQ ID NO: 9524 - RNA, 19 nt, Artificial Sequence
  Synthetic Oligonucleotide
caaaaaugcaguugggguc

SEQ ID NO: 9525 - RNA, 19 nt, Artificial Sequence
  Synthetic Oligonucleotide
caaaaaugcgauugggguc

SEQ ID NO: 9526 - RNA, 19 nt, Artificial Sequence
  Synthetic Oligonucleotide
caaagaugcaauugggguc

SEQ ID NO: 9527 - RNA, 19 nt, Artificial Sequence
  Synthetic Oligonucleotide
caaagaugcaguugggguc

SEQ ID NO: 9528 - RNA, 19 nt, Artificial Sequence
  Synthetic Oligonucleotide
caaaaaugcaauugggauc

SEQ ID NO: 9529 - RNA, 19 nt, Artificial Sequence
  Synthetic Oligonucleotide
caaaaaugcaauugggcuc

SEQ ID NO: 9530 - RNA, 19 nt, Artificial Sequence
  Synthetic Oligonucleotide
caaaaaugcaauuggaguc

SEQ ID NO: 9531 - RNA, 19 nt, Artificial Sequence
  Synthetic Oligonucleotide
caaaaaugcaauuggcguc

SEQ ID NO: 9532 - RNA, 19 nt, Artificial Sequence
  Synthetic Oligonucleotide
caaaaaugcaauuaggguc

SEQ ID NO: 9533 - RNA, 19 nt, Artificial Sequence
  Synthetic Oligonucleotide
caaaauugcaauugggguc

SEQ ID NO: 9534 - RNA, 19 nt, Artificial Sequence
  Synthetic Oligonucleotide
caaaaaugcaauugggauu

SEQ ID NO: 9535 - RNA, 19 nt, Artificial Sequence
  Synthetic Oligonucleotide
caaaaaugcaguuggaguc

SEQ ID NO: 9536 - RNA, 19 nt, Artificial Sequence
  Synthetic Oligonucleotide
caaaaaugcaguuggcguc

SEQ ID NO: 9537 - RNA, 19 nt, Artificial Sequence
  Synthetic Oligonucleotide
caaaagugcaauuggcguc

SEQ ID NO: 9538 - RNA, 19 nt, Artificial Sequence
  Synthetic Oligonucleotide
caaaaaugcaauugggacc

SEQ ID NO: 9539 - RNA, 19 nt, Artificial Sequence
  Synthetic Oligonucleotide
caaaaaugcaauuggauuc

SEQ ID NO: 9540 - RNA, 19 nt, Artificial Sequence
  Synthetic Oligonucleotide
aaaaaugcaauugggguuc

SEQ ID NO: 9541 - RNA, 19 nt, Artificial Sequence
  Synthetic Oligonucleotide
aaaaaugcaguuggggucc

SEQ ID NO: 9542 - RNA, 19 nt, Artificial Sequence
  Synthetic Oligonucleotide
aaaaaugcgauuggggucc

SEQ ID NO: 9543 - RNA, 19 nt, Artificial Sequence
  Synthetic Oligonucleotide
aaagaugcaauuggggucc

SEQ ID NO: 9544 - RNA, 19 nt, Artificial Sequence
  Synthetic Oligonucleotide
aaagaugcaguuggggucc

SEQ ID NO: 9545 - RNA, 19 nt, Artificial Sequence
  Synthetic Oligonucleotide
aaaaaugcaauugggaucc

SEQ ID NO: 9546 - RNA, 19 nt, Artificial Sequence
  Synthetic Oligonucleotide
aaaaaugcaauugggcucc

SEQ ID NO: 9547 - RNA, 19 nt, Artificial Sequence
  Synthetic Oligonucleotide
aaaaaugcaauuggagucc

SEQ ID NO: 9548 - RNA, 19 nt, Artificial Sequence
  Synthetic Oligonucleotide
aaaaaugcaauuggcgucc

SEQ ID NO: 9549 - RNA, 19 nt, Artificial Sequence
  Synthetic Oligonucleotide
aaaaaugcaauuagggucc

SEQ ID NO: 9550 - RNA, 19 nt, Artificial Sequence
  Synthetic Oligonucleotide
aaaauugcaauuggggucc

SEQ ID NO: 9551 - RNA, 19 nt, Artificial Sequence
  Synthetic Oligonucleotide
aaaaaugcaauugggauuc

SEQ ID NO: 9552 - RNA, 19 nt, Artificial Sequence
  Synthetic Oligonucleotide
aaaaaugcaguuggagucc

SEQ ID NO: 9553 - RNA, 19 nt, Artificial Sequence
  Synthetic Oligonucleotide
aaaaaugcaguuggcgucc

SEQ ID NO: 9554 - RNA, 19 nt, Artificial Sequence
  Synthetic Oligonucleotide
aaaagugcaauuggcgucc

SEQ ID NO: 9555 - RNA, 19 nt, Artificial Sequence
  Synthetic Oligonucleotide
aaaaaugcaauugggaccc

SEQ ID NO: 9556 - RNA, 19 nt, Artificial Sequence
  Synthetic Oligonucleotide
aaaaaugcaauuggauucc

SEQ ID NO: 9557 - RNA, 19 nt, Artificial Sequence
  Synthetic Oligonucleotide
aaugcaauugggguccucg

SEQ ID NO: 9558 - RNA, 19 nt, Artificial Sequence
  Synthetic Oligonucleotide
aaugcaauugggguucuca

SEQ ID NO: 9559 - RNA, 19 nt, Artificial Sequence
  Synthetic Oligonucleotide
aaugcaguugggguccuca

SEQ ID NO: 9560 - RNA, 19 nt, Artificial Sequence
  Synthetic Oligonucleotide
aaugcgauugggguccuca

SEQ ID NO: 9561 - RNA, 19 nt, Artificial Sequence
  Synthetic Oligonucleotide
gaugcaauugggguccuca

SEQ ID NO: 9562 - RNA, 19 nt, Artificial Sequence
  Synthetic Oligonucleotide
gaugcaguugggguccuca

SEQ ID NO: 9563 - RNA, 19 nt, Artificial Sequence
  Synthetic Oligonucleotide
aaugcaauugggauccuca

SEQ ID NO: 9564 - RNA, 19 nt, Artificial Sequence
  Synthetic Oligonucleotide
aaugcaauugggcuccuca

SEQ ID NO: 9565 - RNA, 19 nt, Artificial Sequence
  Synthetic Oligonucleotide
aaugcaauuggaguccuca

SEQ ID NO: 9566 - RNA, 19 nt, Artificial Sequence
  Synthetic Oligonucleotide
aaugcaauuggcguccuca

SEQ ID NO: 9567 - RNA, 19 nt, Artificial Sequence
  Synthetic Oligonucleotide
aaugcaauuaggguccuca

SEQ ID NO: 9568 - RNA, 19 nt, Artificial Sequence
  Synthetic Oligonucleotide
auugcaauugggguccuca

SEQ ID NO: 9569 - RNA, 19 nt, Artificial Sequence
  Synthetic Oligonucleotide
aaugcaauugggauucuca

SEQ ID NO: 9570 - RNA, 19 nt, Artificial Sequence
  Synthetic Oligonucleotide
aaugcaguuggaguccuca

SEQ ID NO: 9571 - RNA, 19 nt, Artificial Sequence
  Synthetic Oligonucleotide
aaugcaguuggcguccuca

SEQ ID NO: 9572 - RNA, 19 nt, Artificial Sequence
  Synthetic Oligonucleotide
agugcaauuggcguccuca

SEQ ID NO: 9573 - RNA, 19 nt, Artificial Sequence
  Synthetic Oligonucleotide
aaugcaauugggacccuca

SEQ ID NO: 9574 - RNA, 19 nt, Artificial Sequence
  Synthetic Oligonucleotide
aaugcaauuggauuccuca

SEQ ID NO: 9575 - RNA, 19 nt, Artificial Sequence
  Synthetic Oligonucleotide
augcaauugggguccucgu

SEQ ID NO: 9576 - RNA, 19 nt, Artificial Sequence
  Synthetic Oligonucleotide
augcaauugggguucucau

SEQ ID NO: 9577 - RNA, 19 nt, Artificial Sequence
  Synthetic Oligonucleotide
augcaguugggguccucau

SEQ ID NO: 9578 - RNA, 19 nt, Artificial Sequence
  Synthetic Oligonucleotide
augcgauugggguccucau

SEQ ID NO: 9579 - RNA, 19 nt, Artificial Sequence
  Synthetic Oligonucleotide
augcaauugggguccucac

SEQ ID NO: 9580 - RNA, 19 nt, Artificial Sequence
  Synthetic Oligonucleotide
augcaauugggauccucau

SEQ ID NO: 9581 - RNA, 19 nt, Artificial Sequence
  Synthetic Oligonucleotide
augcaauugggcuccucau

SEQ ID NO: 9582 - RNA, 19 nt, Artificial Sequence
  Synthetic Oligonucleotide
augcaauuggaguccucau

SEQ ID NO: 9583 - RNA, 19 nt, Artificial Sequence
  Synthetic Oligonucleotide
augcaauuggcguccucau

SEQ ID NO: 9584 - RNA, 19 nt, Artificial Sequence
  Synthetic Oligonucleotide
augcaauuaggguccucau

SEQ ID NO: 9585 - RNA, 19 nt, Artificial Sequence
  Synthetic Oligonucleotide
uugcaauugggguccucau

SEQ ID NO: 9586 - RNA, 19 nt, Artificial Sequence
  Synthetic Oligonucleotide
augcaauugggauucucau

SEQ ID NO: 9587 - RNA, 19 nt, Artificial Sequence
  Synthetic Oligonucleotide
augcaguuggaguccucau

SEQ ID NO: 9588 - RNA, 19 nt, Artificial Sequence
  Synthetic Oligonucleotide
augcaguuggcguccucau

SEQ ID NO: 9589 - RNA, 19 nt, Artificial Sequence
  Synthetic Oligonucleotide
gugcaauuggcguccucau

SEQ ID NO: 9590 - RNA, 19 nt, Artificial Sequence
  Synthetic Oligonucleotide
augcaauugggacccucau

SEQ ID NO: 9591 - RNA, 19 nt, Artificial Sequence
  Synthetic Oligonucleotide
augcaauuggauuccucau

SEQ ID NO: 9592 - RNA, 19 nt, Artificial Sequence
  Synthetic Oligonucleotide
acuaagggcuuucacugaa

SEQ ID NO: 9593 - RNA, 19 nt, Artificial Sequence
  Synthetic Oligonucleotide
acuaagggcuuucaucgaa

SEQ ID NO: 9594 - RNA, 19 nt, Artificial Sequence
  Synthetic Oligonucleotide
acuaagggcuuuuaccgaa

SEQ ID NO: 9595 - RNA, 19 nt, Artificial Sequence
  Synthetic Oligonucleotide
acugagggcuuucaccgaa

SEQ ID NO: 9596 - RNA, 19 nt, Artificial Sequence
  Synthetic Oligonucleotide
auuaagggcuuucaccgaa

SEQ ID NO: 9597 - RNA, 19 nt, Artificial Sequence
  Synthetic Oligonucleotide
gcuaagggcuuucaccgaa

SEQ ID NO: 9598 - RNA, 19 nt, Artificial Sequence
  Synthetic Oligonucleotide
acuaagggcuuucacugag

SEQ ID NO: 9599 - RNA, 19 nt, Artificial Sequence
  Synthetic Oligonucleotide
gcuaagggcuuucaccgag

SEQ ID NO: 9600 - RNA, 19 nt, Artificial Sequence
  Synthetic Oligonucleotide
acuaagggcuuucaccaaa

SEQ ID NO: 9601 - RNA, 19 nt, Artificial Sequence
  Synthetic Oligonucleotide
acuaagggcuuucacagaa

SEQ ID NO: 9602 - RNA, 19 nt, Artificial Sequence
  Synthetic Oligonucleotide
acuaagggcuaucaccgaa

SEQ ID NO: 9603 - RNA, 19 nt, Artificial Sequence
  Synthetic Oligonucleotide
acuaagggcucucaccgaa

SEQ ID NO: 9604 - RNA, 19 nt, Artificial Sequence
  Synthetic Oligonucleotide
acuaagggccuucaccgaa

SEQ ID NO: 9605 - RNA, 19 nt, Artificial Sequence
  Synthetic Oligonucleotide
acuaagggguuucaccgaa

SEQ ID NO: 9606 - RNA, 19 nt, Artificial Sequence
  Synthetic Oligonucleotide
acuaagagcuuucaccgaa

SEQ ID NO: 9607 - RNA, 19 nt, Artificial Sequence
  Synthetic Oligonucleotide
acuaaaggcuuucaccgaa

SEQ ID NO: 9608 - RNA, 19 nt, Artificial Sequence
  Synthetic Oligonucleotide
acuuagggcuuucaccgaa

SEQ ID NO: 9609 - RNA, 19 nt, Artificial Sequence
  Synthetic Oligonucleotide
acaaagggcuuucaccgaa

SEQ ID NO: 9610 - RNA, 19 nt, Artificial Sequence
  Synthetic Oligonucleotide
acuaagggccuucaccgag

SEQ ID NO: 9611 - RNA, 19 nt, Artificial Sequence
  Synthetic Oligonucleotide
acucagagcuuucacugaa

SEQ ID NO: 9612 - RNA, 19 nt, Artificial Sequence
  Synthetic Oligonucleotide
acuuagagcuuucacagaa

SEQ ID NO: 9613 - RNA, 19 nt, Artificial Sequence
  Synthetic Oligonucleotide
ucaccgaagagggagcagu

SEQ ID NO: 9614 - RNA, 19 nt, Artificial Sequence
  Synthetic Oligonucleotide
ucaccgaagagggaguaau

SEQ ID NO: 9615 - RNA, 19 nt, Artificial Sequence
  Synthetic Oligonucleotide
ucaccgaagagggggcaau

SEQ ID NO: 9616 - RNA, 19 nt, Artificial Sequence
  Synthetic Oligonucleotide
ucaccgaggagggagcaau

SEQ ID NO: 9617 - RNA, 19 nt, Artificial Sequence
  Synthetic Oligonucleotide
ucacugaagagggagcaau

SEQ ID NO: 9618 - RNA, 19 nt, Artificial Sequence
  Synthetic Oligonucleotide
ucaucgaagagggagcaau

SEQ ID NO: 9619 - RNA, 19 nt, Artificial Sequence
  Synthetic Oligonucleotide
uuaccgaagagggagcaau

SEQ ID NO: 9620 - RNA, 19 nt, Artificial Sequence
  Synthetic Oligonucleotide
ucacugaggagggagcaau

SEQ ID NO: 9621 - RNA, 19 nt, Artificial Sequence
  Synthetic Oligonucleotide
ucaccgaagagggaacaau

SEQ ID NO: 9622 - RNA, 19 nt, Artificial Sequence
  Synthetic Oligonucleotide
ucaccgaagagggcgcaau

SEQ ID NO: 9623 - RNA, 19 nt, Artificial Sequence
  Synthetic Oligonucleotide
ucaccgaagagggugcaau

SEQ ID NO: 9624 - RNA, 19 nt, Artificial Sequence
  Synthetic Oligonucleotide
ucaccgaagaggaagcaau

SEQ ID NO: 9625 - RNA, 19 nt, Artificial Sequence
  Synthetic Oligonucleotide
ucaccgaagaaggagcaau

SEQ ID NO: 9626 - RNA, 19 nt, Artificial Sequence
  Synthetic Oligonucleotide
ucaccgaagauggagcaau

SEQ ID NO: 9627 - RNA, 19 nt, Artificial Sequence
  Synthetic Oligonucleotide
ucaccgaagcgggagcaau

SEQ ID NO: 9628 - RNA, 19 nt, Artificial Sequence
  Synthetic Oligonucleotide
ucaccgaaaagggagcaau

SEQ ID NO: 9629 - RNA, 19 nt, Artificial Sequence
  Synthetic Oligonucleotide
ucaccaaagagggagcaau

SEQ ID NO: 9630 - RNA, 19 nt, Artificial Sequence
  Synthetic Oligonucleotide
ucacagaagagggagcaau

SEQ ID NO: 9631 - RNA, 19 nt, Artificial Sequence
  Synthetic Oligonucleotide
ucaccgaagaggggacaau

SEQ ID NO: 9632 - RNA, 19 nt, Artificial Sequence
  Synthetic Oligonucleotide
ucacagaagggggagcaau

SEQ ID NO: 9633 - RNA, 19 nt, Artificial Sequence
  Synthetic Oligonucleotide
ucacugaagaaggagcaau

SEQ ID NO: 9634 - RNA, 19 nt, Artificial Sequence
  Synthetic Oligonucleotide
ucaccgaagagggacgaau

SEQ ID NO: 9635 - RNA, 19 nt, Artificial Sequence
  Synthetic Oligonucleotide
ucacagaagaaggagcaau

SEQ ID NO: 9636 - RNA, 19 nt, Artificial Sequence
  Synthetic Oligonucleotide
ucacagaagaaggggcaau

SEQ ID NO: 9637 - RNA, 19 nt, Artificial Sequence
  Synthetic Oligonucleotide
ucacagaaggaggagcaau

SEQ ID NO: 9638 - RNA, 19 nt, Artificial Sequence
  Synthetic Oligonucleotide
ucacggaagaaggggcaau

SEQ ID NO: 9639 - RNA, 19 nt, Artificial Sequence
  Synthetic Oligonucleotide
uuucaccgaagagggagua

SEQ ID NO: 9640 - RNA, 19 nt, Artificial Sequence
  Synthetic Oligonucleotide
uuucaccgaagagggggca

SEQ ID NO: 9641 - RNA, 19 nt, Artificial Sequence
  Synthetic Oligonucleotide
uuucaccgaggagggagca

SEQ ID NO: 9642 - RNA, 19 nt, Artificial Sequence
  Synthetic Oligonucleotide
uuucacugaagagggagca

SEQ ID NO: 9643 - RNA, 19 nt, Artificial Sequence
  Synthetic Oligonucleotide
uuucaucgaagagggagca

SEQ ID NO: 9644 - RNA, 19 nt, Artificial Sequence
  Synthetic Oligonucleotide
uuuuaccgaagagggagca

SEQ ID NO: 9645 - RNA, 19 nt, Artificial Sequence
  Synthetic Oligonucleotide
uuucacugaggagggagca

SEQ ID NO: 9646 - RNA, 19 nt, Artificial Sequence
  Synthetic Oligonucleotide
uuucaccgaagagggaaca

SEQ ID NO: 9647 - RNA, 19 nt, Artificial Sequence
  Synthetic Oligonucleotide
uuucaccgaagagggcgca

SEQ ID NO: 9648 - RNA, 19 nt, Artificial Sequence
  Synthetic Oligonucleotide
uuucaccgaagagggugca

SEQ ID NO: 9649 - RNA, 19 nt, Artificial Sequence
  Synthetic Oligonucleotide
uuucaccgaagaggaagca

SEQ ID NO: 9650 - RNA, 19 nt, Artificial Sequence
  Synthetic Oligonucleotide
uuucaccgaagaaggagca

SEQ ID NO: 9651 - RNA, 19 nt, Artificial Sequence
  Synthetic Oligonucleotide
uuucaccgaagauggagca

SEQ ID NO: 9652 - RNA, 19 nt, Artificial Sequence
  Synthetic Oligonucleotide
uuucaccgaagcgggagca

SEQ ID NO: 9653 - RNA, 19 nt, Artificial Sequence
  Synthetic Oligonucleotide
uuucaccgaaaagggagca

SEQ ID NO: 9654 - RNA, 19 nt, Artificial Sequence
  Synthetic Oligonucleotide
uuucaccaaagagggagca

SEQ ID NO: 9655 - RNA, 19 nt, Artificial Sequence
  Synthetic Oligonucleotide
uuucacagaagagggagca

SEQ ID NO: 9656 - RNA, 19 nt, Artificial Sequence
  Synthetic Oligonucleotide
uaucaccgaagagggagca

SEQ ID NO: 9657 - RNA, 19 nt, Artificial Sequence
  Synthetic Oligonucleotide
ucucaccgaagagggagca

SEQ ID NO: 9658 - RNA, 19 nt, Artificial Sequence
  Synthetic Oligonucleotide
cuucaccgaagagggagca

SEQ ID NO: 9659 - RNA, 19 nt, Artificial Sequence
  Synthetic Oligonucleotide
uuucacagaagggggagca

SEQ ID NO: 9660 - RNA, 19 nt, Artificial Sequence
  Synthetic Oligonucleotide
uuucacugaagaaggagca

SEQ ID NO: 9661 - RNA, 19 nt, Artificial Sequence
  Synthetic Oligonucleotide
cuucaccgaggagggagca

SEQ ID NO: 9662 - RNA, 19 nt, Artificial Sequence
  Synthetic Oligonucleotide
uuucaccgaagagggacga

SEQ ID NO: 9663 - RNA, 19 nt, Artificial Sequence
  Synthetic Oligonucleotide
uuucacagaagaaggagca

SEQ ID NO: 9664 - RNA, 19 nt, Artificial Sequence
  Synthetic Oligonucleotide
cuucaccgaagagggaaca

SEQ ID NO: 9665 - RNA, 19 nt, Artificial Sequence
  Synthetic Oligonucleotide
uuucacagaagaaggggca

SEQ ID NO: 9666 - RNA, 19 nt, Artificial Sequence
  Synthetic Oligonucleotide
uuucacagaaggaggagca

SEQ ID NO: 9667 - RNA, 19 nt, Artificial Sequence
  Synthetic Oligonucleotide
uuucacggaagaaggggca

SEQ ID NO: 9668 - RNA, 19 nt, Artificial Sequence
  Synthetic Oligonucleotide
cuucaccgaagaggggaca

SEQ ID NO: 9669 - RNA, 19 nt, Artificial Sequence
  Synthetic Oligonucleotide
aagagggagcaguuguugg

SEQ ID NO: 9670 - RNA, 19 nt, Artificial Sequence
  Synthetic Oligonucleotide
aagagggaguaauuguugg

SEQ ID NO: 9671 - RNA, 19 nt, Artificial Sequence
  Synthetic Oligonucleotide
aagagggggcaauuguugg

SEQ ID NO: 9672 - RNA, 19 nt, Artificial Sequence
  Synthetic Oligonucleotide
aggagggagcaauuguugg

SEQ ID NO: 9673 - RNA, 19 nt, Artificial Sequence
  Synthetic Oligonucleotide
aagagggagcaauuguugc

SEQ ID NO: 9674 - RNA, 19 nt, Artificial Sequence
  Synthetic Oligonucleotide
aagagggagcaauuguagg

SEQ ID NO: 9675 - RNA, 19 nt, Artificial Sequence
  Synthetic Oligonucleotide
aagagggagcaauuguggg

SEQ ID NO: 9676 - RNA, 19 nt, Artificial Sequence
  Synthetic Oligonucleotide
aagagggagcaauugcugg

SEQ ID NO: 9677 - RNA, 19 nt, Artificial Sequence
  Synthetic Oligonucleotide
aagagggagcaauuauugg

SEQ ID NO: 9678 - RNA, 19 nt, Artificial Sequence
  Synthetic Oligonucleotide
aagagggagcaaucguugg

SEQ ID NO: 9679 - RNA, 19 nt, Artificial Sequence
  Synthetic Oligonucleotide
aagagggaacaauuguugg

SEQ ID NO: 9680 - RNA, 19 nt, Artificial Sequence
  Synthetic Oligonucleotide
aagagggcgcaauuguugg

SEQ ID NO: 9681 - RNA, 19 nt, Artificial Sequence
  Synthetic Oligonucleotide
aagagggugcaauuguugg

SEQ ID NO: 9682 - RNA, 19 nt, Artificial Sequence
  Synthetic Oligonucleotide
aagaggaagcaauuguugg

SEQ ID NO: 9683 - RNA, 19 nt, Artificial Sequence
  Synthetic Oligonucleotide
aagaaggagcaauuguugg

SEQ ID NO: 9684 - RNA, 19 nt, Artificial Sequence
  Synthetic Oligonucleotide
aagauggagcaauuguugg

SEQ ID NO: 9685 - RNA, 19 nt, Artificial Sequence
  Synthetic Oligonucleotide
aagcgggagcaauuguugg

SEQ ID NO: 9686 - RNA, 19 nt, Artificial Sequence
  Synthetic Oligonucleotide
aaaagggagcaauuguugg

SEQ ID NO: 9687 - RNA, 19 nt, Artificial Sequence
  Synthetic Oligonucleotide
aagaggggacaauuguugg

SEQ ID NO: 9688 - RNA, 19 nt, Artificial Sequence
  Synthetic Oligonucleotide
aggagggagcaauugucgg

SEQ ID NO: 9689 - RNA, 19 nt, Artificial Sequence
  Synthetic Oligonucleotide
aggagggagcaaucguugg

SEQ ID NO: 9690 - RNA, 19 nt, Artificial Sequence
  Synthetic Oligonucleotide
aagagggagcaaucguggg

SEQ ID NO: 9691 - RNA, 19 nt, Artificial Sequence
  Synthetic Oligonucleotide
aagagggacgaauuguugg

SEQ ID NO: 9692 - RNA, 19 nt, Artificial Sequence
  Synthetic Oligonucleotide
aagaaggagcaaucguugg

SEQ ID NO: 9693 - RNA, 19 nt, Artificial Sequence
  Synthetic Oligonucleotide
aagaaggggcaauuguagg

SEQ ID NO: 9694 - RNA, 19 nt, Artificial Sequence
  Synthetic Oligonucleotide
aagggggagcaaucguggg

SEQ ID NO: 9695 - RNA, 19 nt, Artificial Sequence
  Synthetic Oligonucleotide
aagaaggagcaaucguagg

SEQ ID NO: 9696 - RNA, 19 nt, Artificial Sequence
  Synthetic Oligonucleotide
aagaaggagcaaucguggg

SEQ ID NO: 9697 - RNA, 19 nt, Artificial Sequence
  Synthetic Oligonucleotide
acgaaggagcaauuguggg

SEQ ID NO: 9698 - RNA, 19 nt, Artificial Sequence
  Synthetic Oligonucleotide
gaagagggagcaguuguug

SEQ ID NO: 9699 - RNA, 19 nt, Artificial Sequence
  Synthetic Oligonucleotide
gaagagggaguaauuguug

SEQ ID NO: 9700 - RNA, 19 nt, Artificial Sequence
  Synthetic Oligonucleotide
gaagagggggcaauuguug

SEQ ID NO: 9701 - RNA, 19 nt, Artificial Sequence
  Synthetic Oligonucleotide
gaggagggagcaauuguug

SEQ ID NO: 9702 - RNA, 19 nt, Artificial Sequence
  Synthetic Oligonucleotide
gaagagggagcaauuguag

SEQ ID NO: 9703 - RNA, 19 nt, Artificial Sequence
  Synthetic Oligonucleotide
gaagagggagcaauugugg

SEQ ID NO: 9704 - RNA, 19 nt, Artificial Sequence
  Synthetic Oligonucleotide
gaagagggagcaauugcug

SEQ ID NO: 9705 - RNA, 19 nt, Artificial Sequence
  Synthetic Oligonucleotide
gaagagggagcaauuauug

SEQ ID NO: 9706 - RNA, 19 nt, Artificial Sequence
  Synthetic Oligonucleotide
gaagagggagcaaucguug

SEQ ID NO: 9707 - RNA, 19 nt, Artificial Sequence
  Synthetic Oligonucleotide
gaagagggaacaauuguug

SEQ ID NO: 9708 - RNA, 19 nt, Artificial Sequence
  Synthetic Oligonucleotide
gaagagggcgcaauuguug

SEQ ID NO: 9709 - RNA, 19 nt, Artificial Sequence
  Synthetic Oligonucleotide
gaagagggugcaauuguug

SEQ ID NO: 9710 - RNA, 19 nt, Artificial Sequence
  Synthetic Oligonucleotide
gaagaggaagcaauuguug

SEQ ID NO: 9711 - RNA, 19 nt, Artificial Sequence
  Synthetic Oligonucleotide
gaagaaggagcaauuguug

SEQ ID NO: 9712 - RNA, 19 nt, Artificial Sequence
  Synthetic Oligonucleotide
gaagauggagcaauuguug

SEQ ID NO: 9713 - RNA, 19 nt, Artificial Sequence
  Synthetic Oligonucleotide
gaagcgggagcaauuguug

SEQ ID NO: 9714 - RNA, 19 nt, Artificial Sequence
  Synthetic Oligonucleotide
gaaaagggagcaauuguug

SEQ ID NO: 9715 - RNA, 19 nt, Artificial Sequence
  Synthetic Oligonucleotide
aaagagggagcaauuguug

SEQ ID NO: 9716 - RNA, 19 nt, Artificial Sequence
  Synthetic Oligonucleotide
gaagaggggacaauuguug

SEQ ID NO: 9717 - RNA, 19 nt, Artificial Sequence
  Synthetic Oligonucleotide
gaggagggagcaauugucg

SEQ ID NO: 9718 - RNA, 19 nt, Artificial Sequence
  Synthetic Oligonucleotide
gaggagggagcaaucguug

SEQ ID NO: 9719 - RNA, 19 nt, Artificial Sequence
  Synthetic Oligonucleotide
gaagagggagcaaucgugg

SEQ ID NO: 9720 - RNA, 19 nt, Artificial Sequence
  Synthetic Oligonucleotide
gaagagggacgaauuguug

SEQ ID NO: 9721 - RNA, 19 nt, Artificial Sequence
  Synthetic Oligonucleotide
gaagaaggagcaaucguug

SEQ ID NO: 9722 - RNA, 19 nt, Artificial Sequence
  Synthetic Oligonucleotide
gaagaaggggcaauuguag

SEQ ID NO: 9723 - RNA, 19 nt, Artificial Sequence
  Synthetic Oligonucleotide
gaagggggagcaaucgugg

SEQ ID NO: 9724 - RNA, 19 nt, Artificial Sequence
  Synthetic Oligonucleotide
gaagaaggagcaaucguag

SEQ ID NO: 9725 - RNA, 19 nt, Artificial Sequence
  Synthetic Oligonucleotide
gaagaaggagcaaucgugg

SEQ ID NO: 9726 - RNA, 19 nt, Artificial Sequence
  Synthetic Oligonucleotide
gacgaaggagcaauugugg

SEQ ID NO: 9727 - RNA, 19 nt, Artificial Sequence
  Synthetic Oligonucleotide
uuccuugaucggcuucguc

SEQ ID NO: 9728 - RNA, 19 nt, Artificial Sequence
  Synthetic Oligonucleotide
uuucuugaucggcuucgcc

SEQ ID NO: 9729 - RNA, 19 nt, Artificial Sequence
  Synthetic Oligonucleotide
uuccuugaucggcuucgca

SEQ ID NO: 9730 - RNA, 19 nt, Artificial Sequence
  Synthetic Oligonucleotide
uuccuugaucggcuucacc

SEQ ID NO: 9731 - RNA, 19 nt, Artificial Sequence
  Synthetic Oligonucleotide
uuccuugaucggcuuagcc

SEQ ID NO: 9732 - RNA, 19 nt, Artificial Sequence
  Synthetic Oligonucleotide
uuccuugaucggcuccgcc

SEQ ID NO: 9733 - RNA, 19 nt, Artificial Sequence
  Synthetic Oligonucleotide
uuccuugaucggauucgcc

SEQ ID NO: 9734 - RNA, 19 nt, Artificial Sequence
  Synthetic Oligonucleotide
uuccuugaucgacuucgcc

SEQ ID NO: 9735 - RNA, 19 nt, Artificial Sequence
  Synthetic Oligonucleotide
uuccuugauaggcuucgcc

SEQ ID NO: 9736 - RNA, 19 nt, Artificial Sequence
  Synthetic Oligonucleotide
uuccuugaccggcuucgcc

SEQ ID NO: 9737 - RNA, 19 nt, Artificial Sequence
  Synthetic Oligonucleotide
uuccucgaucggcuucgcc

SEQ ID NO: 9738 - RNA, 19 nt, Artificial Sequence
  Synthetic Oligonucleotide
uucauugaucggcuucgcc

SEQ ID NO: 9739 - RNA, 19 nt, Artificial Sequence
  Synthetic Oligonucleotide
uuccuugaccggcuucguc

SEQ ID NO: 9740 - RNA, 19 nt, Artificial Sequence
  Synthetic Oligonucleotide
uuucucgaucggcuucgcc

SEQ ID NO: 9741 - RNA, 19 nt, Artificial Sequence
  Synthetic Oligonucleotide
uuccuugauagacuucgcc

SEQ ID NO: 9742 - RNA, 19 nt, Artificial Sequence
  Synthetic Oligonucleotide
uucauugaccggcuucgcc

SEQ ID NO: 9743 - RNA, 19 nt, Artificial Sequence
  Synthetic Oligonucleotide
uuccuugaccggguuugcc

SEQ ID NO: 9744 - RNA, 19 nt, Artificial Sequence
  Synthetic Oligonucleotide
uuucuugaccggcuccgcc

SEQ ID NO: 9745 - RNA, 19 nt, Artificial Sequence
  Synthetic Oligonucleotide
uuucuagaccggcuucgcc

SEQ ID NO: 9746 - RNA, 19 nt, Artificial Sequence
  Synthetic Oligonucleotide
uuccuugaucggcuucwww

SEQ ID NO: 9747 - RNA, 19 nt, Artificial Sequence
  Synthetic Oligonucleotide
uwccuugaucgacuucgca

SEQ ID NO: 9748 - RNA, 19 nt, Artificial Sequence
  Synthetic Oligonucleotide
uccuugaucggcuucgucg

SEQ ID NO: 9749 - RNA, 19 nt, Artificial Sequence
  Synthetic Oligonucleotide
uucuugaucggcuucgccg

SEQ ID NO: 9750 - RNA, 19 nt, Artificial Sequence
  Synthetic Oligonucleotide
uccuugaucggcuucgcag

SEQ ID NO: 9751 - RNA, 19 nt, Artificial Sequence
  Synthetic Oligonucleotide
uccuugaucggcuucaccg

SEQ ID NO: 9752 - RNA, 19 nt, Artificial Sequence
  Synthetic Oligonucleotide
uccuugaucggcuuagccg

SEQ ID NO: 9753 - RNA, 19 nt, Artificial Sequence
  Synthetic Oligonucleotide
uccuugaucggcuccgccg

SEQ ID NO: 9754 - RNA, 19 nt, Artificial Sequence
  Synthetic Oligonucleotide
uccuugaucggauucgccg

SEQ ID NO: 9755 - RNA, 19 nt, Artificial Sequence
  Synthetic Oligonucleotide
uccuugaucgacuucgccg

SEQ ID NO: 9756 - RNA, 19 nt, Artificial Sequence
  Synthetic Oligonucleotide
uccuugauaggcuucgccg

SEQ ID NO: 9757 - RNA, 19 nt, Artificial Sequence
  Synthetic Oligonucleotide
uccuugaccggcuucgccg

SEQ ID NO: 9758 - RNA, 19 nt, Artificial Sequence
  Synthetic Oligonucleotide
uccucgaucggcuucgccg

SEQ ID NO: 9759 - RNA, 19 nt, Artificial Sequence
  Synthetic Oligonucleotide
ucauugaucggcuucgccg

SEQ ID NO: 9760 - RNA, 19 nt, Artificial Sequence
  Synthetic Oligonucleotide
uccuugaccggcuucgucg

SEQ ID NO: 9761 - RNA, 19 nt, Artificial Sequence
  Synthetic Oligonucleotide
uucucgaucggcuucgccg

SEQ ID NO: 9762 - RNA, 19 nt, Artificial Sequence
  Synthetic Oligonucleotide
uccuugauagacuucgccg

SEQ ID NO: 9763 - RNA, 19 nt, Artificial Sequence
  Synthetic Oligonucleotide
ucauugaccggcuucgccg

SEQ ID NO: 9764 - RNA, 19 nt, Artificial Sequence
  Synthetic Oligonucleotide
uccuugaccggguuugccg

SEQ ID NO: 9765 - RNA, 19 nt, Artificial Sequence
  Synthetic Oligonucleotide
uucuugaccggcuccgccg

SEQ ID NO: 9766 - RNA, 19 nt, Artificial Sequence
  Synthetic Oligonucleotide
uucuagaccggcuucgccg

SEQ ID NO: 9767 - RNA, 19 nt, Artificial Sequence
  Synthetic Oligonucleotide
wccuugaucgacuucgcag

SEQ ID NO: 9768 - RNA, 19 nt, Artificial Sequence
  Synthetic Oligonucleotide
cuuucaccgaagagggagu

SEQ ID NO: 9769 - RNA, 19 nt, Artificial Sequence
  Synthetic Oligonucleotide
cuuucaccgaagagggggc

SEQ ID NO: 9770 - RNA, 19 nt, Artificial Sequence
  Synthetic Oligonucleotide
cuuucaccgaggagggagc

SEQ ID NO: 9771 - RNA, 19 nt, Artificial Sequence
  Synthetic Oligonucleotide
cuuucacugaagagggagc

SEQ ID NO: 9772 - RNA, 19 nt, Artificial Sequence
  Synthetic Oligonucleotide
cuuucaucgaagagggagc

SEQ ID NO: 9773 - RNA, 19 nt, Artificial Sequence
  Synthetic Oligonucleotide
cuuuuaccgaagagggagc

SEQ ID NO: 9774 - RNA, 19 nt, Artificial Sequence
  Synthetic Oligonucleotide
cuuucacugaggagggagc

SEQ ID NO: 9775 - RNA, 19 nt, Artificial Sequence
  Synthetic Oligonucleotide
cuuucaccgaagagggaac

SEQ ID NO: 9776 - RNA, 19 nt, Artificial Sequence
  Synthetic Oligonucleotide
cuuucaccgaagagggcgc

SEQ ID NO: 9777 - RNA, 19 nt, Artificial Sequence
  Synthetic Oligonucleotide
cuuucaccgaagagggugc

SEQ ID NO: 9778 - RNA, 19 nt, Artificial Sequence
  Synthetic Oligonucleotide
cuuucaccgaagaggaagc

SEQ ID NO: 9779 - RNA, 19 nt, Artificial Sequence
  Synthetic Oligonucleotide
cuuucaccgaagaaggagc

SEQ ID NO: 9780 - RNA, 19 nt, Artificial Sequence
  Synthetic Oligonucleotide
cuuucaccgaagauggagc

SEQ ID NO: 9781 - RNA, 19 nt, Artificial Sequence
  Synthetic Oligonucleotide
cuuucaccgaagcgggagc

SEQ ID NO: 9782 - RNA, 19 nt, Artificial Sequence
  Synthetic Oligonucleotide
cuuucaccgaaaagggagc

SEQ ID NO: 9783 - RNA, 19 nt, Artificial Sequence
  Synthetic Oligonucleotide
cuuucaccaaagagggagc

SEQ ID NO: 9784 - RNA, 19 nt, Artificial Sequence
  Synthetic Oligonucleotide
cuuucacagaagagggagc

SEQ ID NO: 9785 - RNA, 19 nt, Artificial Sequence
  Synthetic Oligonucleotide
cuaucaccgaagagggagc

SEQ ID NO: 9786 - RNA, 19 nt, Artificial Sequence
  Synthetic Oligonucleotide
cucucaccgaagagggagc

SEQ ID NO: 9787 - RNA, 19 nt, Artificial Sequence
  Synthetic Oligonucleotide
ccuucaccgaagagggagc

SEQ ID NO: 9788 - RNA, 19 nt, Artificial Sequence
  Synthetic Oligonucleotide
guuucaccgaagagggagc

SEQ ID NO: 9789 - RNA, 19 nt, Artificial Sequence
  Synthetic Oligonucleotide
cuuucacagaagggggagc

SEQ ID NO: 9790 - RNA, 19 nt, Artificial Sequence
  Synthetic Oligonucleotide
cuuucacugaagaaggagc

SEQ ID NO: 9791 - RNA, 19 nt, Artificial Sequence
  Synthetic Oligonucleotide
ccuucaccgaggagggagc

SEQ ID NO: 9792 - RNA, 19 nt, Artificial Sequence
  Synthetic Oligonucleotide
cuuucaccgaagagggacg

SEQ ID NO: 9793 - RNA, 19 nt, Artificial Sequence
  Synthetic Oligonucleotide
cuuucacagaagaaggagc

SEQ ID NO: 9794 - RNA, 19 nt, Artificial Sequence
  Synthetic Oligonucleotide
ccuucaccgaagagggaac

SEQ ID NO: 9795 - RNA, 19 nt, Artificial Sequence
  Synthetic Oligonucleotide
cuuucacagaagaaggggc

SEQ ID NO: 9796 - RNA, 19 nt, Artificial Sequence
  Synthetic Oligonucleotide
cuuucacagaaggaggagc

SEQ ID NO: 9797 - RNA, 19 nt, Artificial Sequence
  Synthetic Oligonucleotide
cuuucacggaagaaggggc

SEQ ID NO: 9798 - RNA, 19 nt, Artificial Sequence
  Synthetic Oligonucleotide
ccuucaccgaagaggggac

SEQ ID NO: 9799 - RNA, 19 nt, Artificial Sequence
  Synthetic Oligonucleotide
agagggagcaauuguuggu

SEQ ID NO: 9800 - RNA, 19 nt, Artificial Sequence
  Synthetic Oligonucleotide
agagggagcaguuguuggc

SEQ ID NO: 9801 - RNA, 19 nt, Artificial Sequence
  Synthetic Oligonucleotide
agagggaguaauuguuggc

SEQ ID NO: 9802 - RNA, 19 nt, Artificial Sequence
  Synthetic Oligonucleotide
agagggggcaauuguuggc

SEQ ID NO: 9803 - RNA, 19 nt, Artificial Sequence
  Synthetic Oligonucleotide
ggagggagcaauuguuggc

SEQ ID NO: 9804 - RNA, 19 nt, Artificial Sequence
  Synthetic Oligonucleotide
agagggagcaauuguugcc

SEQ ID NO: 9805 - RNA, 19 nt, Artificial Sequence
  Synthetic Oligonucleotide
agagggagcaauuguaggc

SEQ ID NO: 9806 - RNA, 19 nt, Artificial Sequence
  Synthetic Oligonucleotide
agagggagcaauugugggc

SEQ ID NO: 9807 - RNA, 19 nt, Artificial Sequence
  Synthetic Oligonucleotide
agagggagcaauugcuggc

SEQ ID NO: 9808 - RNA, 19 nt, Artificial Sequence
  Synthetic Oligonucleotide
agagggagcaauuauuggc

SEQ ID NO: 9809 - RNA, 19 nt, Artificial Sequence
  Synthetic Oligonucleotide
agagggaacaauuguuggc

SEQ ID NO: 9810 - RNA, 19 nt, Artificial Sequence
  Synthetic Oligonucleotide
agagggcgcaauuguuggc

SEQ ID NO: 9811 - RNA, 19 nt, Artificial Sequence
  Synthetic Oligonucleotide
agagggugcaauuguuggc

SEQ ID NO: 9812 - RNA, 19 nt, Artificial Sequence
  Synthetic Oligonucleotide
agaggaagcaauuguuggc

SEQ ID NO: 9813 - RNA, 19 nt, Artificial Sequence
  Synthetic Oligonucleotide
agaaggagcaauuguuggc

SEQ ID NO: 9814 - RNA, 19 nt, Artificial Sequence
  Synthetic Oligonucleotide
agauggagcaauuguuggc

SEQ ID NO: 9815 - RNA, 19 nt, Artificial Sequence
  Synthetic Oligonucleotide
agcgggagcaauuguuggc

SEQ ID NO: 9816 - RNA, 19 nt, Artificial Sequence
  Synthetic Oligonucleotide
aaagggagcaauuguuggc

SEQ ID NO: 9817 - RNA, 19 nt, Artificial Sequence
  Synthetic Oligonucleotide
agagggaacaauuguuggu

SEQ ID NO: 9818 - RNA, 19 nt, Artificial Sequence
  Synthetic Oligonucleotide
agaggggacaauuguuggc

SEQ ID NO: 9819 - RNA, 19 nt, Artificial Sequence
  Synthetic Oligonucleotide
agagggagcaaucguugga

SEQ ID NO: 9820 - RNA, 19 nt, Artificial Sequence
  Synthetic Oligonucleotide
agagggacgaauuguuggc

SEQ ID NO: 9821 - RNA, 19 nt, Artificial Sequence
  Synthetic Oligonucleotide
agaaggggcaauuguaggc

SEQ ID NO: 9822 - RNA, 19 nt, Artificial Sequence
  Synthetic Oligonucleotide
ggagggagcaauugucgga

SEQ ID NO: 9823 - RNA, 19 nt, Artificial Sequence
  Synthetic Oligonucleotide
ggagggagcaaucguugga

SEQ ID NO: 9824 - RNA, 19 nt, Artificial Sequence
  Synthetic Oligonucleotide
agagggagcaaucguggga

SEQ ID NO: 9825 - RNA, 19 nt, Artificial Sequence
  Synthetic Oligonucleotide
agaaggagcaaucguugga

SEQ ID NO: 9826 - RNA, 19 nt, Artificial Sequence
  Synthetic Oligonucleotide
cgaaggagcaauugugggc

SEQ ID NO: 9827 - RNA, 19 nt, Artificial Sequence
  Synthetic Oligonucleotide
uucaccgaagagggagcag

SEQ ID NO: 9828 - RNA, 19 nt, Artificial Sequence
  Synthetic Oligonucleotide
uucaccgaagagggaguaa

SEQ ID NO: 9829 - RNA, 19 nt, Artificial Sequence
  Synthetic Oligonucleotide
uucaccgaagagggggcaa

SEQ ID NO: 9830 - RNA, 19 nt, Artificial Sequence
  Synthetic Oligonucleotide
uucaccgaggagggagcaa

SEQ ID NO: 9831 - RNA, 19 nt, Artificial Sequence
  Synthetic Oligonucleotide
uucacugaagagggagcaa

SEQ ID NO: 9832 - RNA, 19 nt, Artificial Sequence
  Synthetic Oligonucleotide
uucaucgaagagggagcaa

SEQ ID NO: 9833 - RNA, 19 nt, Artificial Sequence
  Synthetic Oligonucleotide
uuuaccgaagagggagcaa

SEQ ID NO: 9834 - RNA, 19 nt, Artificial Sequence
  Synthetic Oligonucleotide
uucacugaggagggagcaa

SEQ ID NO: 9835 - RNA, 19 nt, Artificial Sequence
  Synthetic Oligonucleotide
uucaccgaagagggaacaa

SEQ ID NO: 9836 - RNA, 19 nt, Artificial Sequence
  Synthetic Oligonucleotide
uucaccgaagagggcgcaa

SEQ ID NO: 9837 - RNA, 19 nt, Artificial Sequence
  Synthetic Oligonucleotide
uucaccgaagagggugcaa

SEQ ID NO: 9838 - RNA, 19 nt, Artificial Sequence
  Synthetic Oligonucleotide
uucaccgaagaggaagcaa

SEQ ID NO: 9839 - RNA, 19 nt, Artificial Sequence
  Synthetic Oligonucleotide
uucaccgaagaaggagcaa

SEQ ID NO: 9840 - RNA, 19 nt, Artificial Sequence
  Synthetic Oligonucleotide
uucaccgaagauggagcaa

SEQ ID NO: 9841 - RNA, 19 nt, Artificial Sequence
  Synthetic Oligonucleotide
uucaccgaagcgggagcaa

SEQ ID NO: 9842 - RNA, 19 nt, Artificial Sequence
  Synthetic Oligonucleotide
uucaccgaaaagggagcaa

SEQ ID NO: 9843 - RNA, 19 nt, Artificial Sequence
  Synthetic Oligonucleotide
uucaccaaagagggagcaa

SEQ ID NO: 9844 - RNA, 19 nt, Artificial Sequence
  Synthetic Oligonucleotide
uucacagaagagggagcaa

SEQ ID NO: 9845 - RNA, 19 nt, Artificial Sequence
  Synthetic Oligonucleotide
aucaccgaagagggagcaa

SEQ ID NO: 9846 - RNA, 19 nt, Artificial Sequence
  Synthetic Oligonucleotide
cucaccgaagagggagcaa

SEQ ID NO: 9847 - RNA, 19 nt, Artificial Sequence
  Synthetic Oligonucleotide
uucaccgaagaggggacaa

SEQ ID NO: 9848 - RNA, 19 nt, Artificial Sequence
  Synthetic Oligonucleotide
uucacagaagggggagcaa

SEQ ID NO: 9849 - RNA, 19 nt, Artificial Sequence
  Synthetic Oligonucleotide
uucacugaagaaggagcaa

SEQ ID NO: 9850 - RNA, 19 nt, Artificial Sequence
  Synthetic Oligonucleotide
uucaccgaagagggacgaa

SEQ ID NO: 9851 - RNA, 19 nt, Artificial Sequence
  Synthetic Oligonucleotide
uucacagaagaaggagcaa

SEQ ID NO: 9852 - RNA, 19 nt, Artificial Sequence
  Synthetic Oligonucleotide
uucacagaagaaggggcaa

SEQ ID NO: 9853 - RNA, 19 nt, Artificial Sequence
  Synthetic Oligonucleotide
uucacagaaggaggagcaa

SEQ ID NO: 9854 - RNA, 19 nt, Artificial Sequence
  Synthetic Oligonucleotide
uucacggaagaaggggcaa

SEQ ID NO: 9855 - RNA, 19 nt, Artificial Sequence
  Synthetic Oligonucleotide
uacuaagggcuuucacuga

SEQ ID NO: 9856 - RNA, 19 nt, Artificial Sequence
  Synthetic Oligonucleotide
uacuaagggcuuucaucga

SEQ ID NO: 9857 - RNA, 19 nt, Artificial Sequence
  Synthetic Oligonucleotide
uacuaagggcuuuuaccga

SEQ ID NO: 9858 - RNA, 19 nt, Artificial Sequence
  Synthetic Oligonucleotide
uacugagggcuuucaccga

SEQ ID NO: 9859 - RNA, 19 nt, Artificial Sequence
  Synthetic Oligonucleotide
uauuaagggcuuucaccga

SEQ ID NO: 9860 - RNA, 19 nt, Artificial Sequence
  Synthetic Oligonucleotide
ugcuaagggcuuucaccga

SEQ ID NO: 9861 - RNA, 19 nt, Artificial Sequence
  Synthetic Oligonucleotide
uacuaagggcuuucaccaa

SEQ ID NO: 9862 - RNA, 19 nt, Artificial Sequence
  Synthetic Oligonucleotide
uacuaagggcuuucacaga

SEQ ID NO: 9863 - RNA, 19 nt, Artificial Sequence
  Synthetic Oligonucleotide
uacuaagggcuaucaccga

SEQ ID NO: 9864 - RNA, 19 nt, Artificial Sequence
  Synthetic Oligonucleotide
uacuaagggcucucaccga

SEQ ID NO: 9865 - RNA, 19 nt, Artificial Sequence
  Synthetic Oligonucleotide
uacuaagggccuucaccga

SEQ ID NO: 9866 - RNA, 19 nt, Artificial Sequence
  Synthetic Oligonucleotide
uacuaagggguuucaccga

SEQ ID NO: 9867 - RNA, 19 nt, Artificial Sequence
  Synthetic Oligonucleotide
uacuaagagcuuucaccga

SEQ ID NO: 9868 - RNA, 19 nt, Artificial Sequence
  Synthetic Oligonucleotide
uacuaaaggcuuucaccga

SEQ ID NO: 9869 - RNA, 19 nt, Artificial Sequence
  Synthetic Oligonucleotide
uacuuagggcuuucaccga

SEQ ID NO: 9870 - RNA, 19 nt, Artificial Sequence
  Synthetic Oligonucleotide
uacaaagggcuuucaccga

SEQ ID NO: 9871 - RNA, 19 nt, Artificial Sequence
  Synthetic Oligonucleotide
cacuaagggcuuucaccga

SEQ ID NO: 9872 - RNA, 19 nt, Artificial Sequence
  Synthetic Oligonucleotide
uacucagagcuuucacuga

SEQ ID NO: 9873 - RNA, 19 nt, Artificial Sequence
  Synthetic Oligonucleotide
uacuuagagcuuucacaga

SEQ ID NO: 9874 - RNA, 19 nt, Artificial Sequence
  Synthetic Oligonucleotide
accgaagagggagcaguug

SEQ ID NO: 9875 - RNA, 19 nt, Artificial Sequence
  Synthetic Oligonucleotide
accgaagagggaguaauug

SEQ ID NO: 9876 - RNA, 19 nt, Artificial Sequence
  Synthetic Oligonucleotide
accgaagagggggcaauug

SEQ ID NO: 9877 - RNA, 19 nt, Artificial Sequence
  Synthetic Oligonucleotide
accgaggagggagcaauug

SEQ ID NO: 9878 - RNA, 19 nt, Artificial Sequence
  Synthetic Oligonucleotide
acugaagagggagcaauug

SEQ ID NO: 9879 - RNA, 19 nt, Artificial Sequence
  Synthetic Oligonucleotide
aucgaagagggagcaauug

SEQ ID NO: 9880 - RNA, 19 nt, Artificial Sequence
  Synthetic Oligonucleotide
accgaagagggagcaauua

SEQ ID NO: 9881 - RNA, 19 nt, Artificial Sequence
  Synthetic Oligonucleotide
accgaagagggagcaaucg

SEQ ID NO: 9882 - RNA, 19 nt, Artificial Sequence
  Synthetic Oligonucleotide
accgaagagggaacaauug

SEQ ID NO: 9883 - RNA, 19 nt, Artificial Sequence
  Synthetic Oligonucleotide
accgaagagggcgcaauug

SEQ ID NO: 9884 - RNA, 19 nt, Artificial Sequence
  Synthetic Oligonucleotide
accgaagagggugcaauug

SEQ ID NO: 9885 - RNA, 19 nt, Artificial Sequence
  Synthetic Oligonucleotide
accgaagaggaagcaauug

SEQ ID NO: 9886 - RNA, 19 nt, Artificial Sequence
  Synthetic Oligonucleotide
accgaagaaggagcaauug

SEQ ID NO: 9887 - RNA, 19 nt, Artificial Sequence
  Synthetic Oligonucleotide
accgaagauggagcaauug

SEQ ID NO: 9888 - RNA, 19 nt, Artificial Sequence
  Synthetic Oligonucleotide
accgaagcgggagcaauug

SEQ ID NO: 9889 - RNA, 19 nt, Artificial Sequence
  Synthetic Oligonucleotide
accgaaaagggagcaauug

SEQ ID NO: 9890 - RNA, 19 nt, Artificial Sequence
  Synthetic Oligonucleotide
accaaagagggagcaauug

SEQ ID NO: 9891 - RNA, 19 nt, Artificial Sequence
  Synthetic Oligonucleotide
acagaagagggagcaauug

SEQ ID NO: 9892 - RNA, 19 nt, Artificial Sequence
  Synthetic Oligonucleotide
accgaagaggggacaauug

SEQ ID NO: 9893 - RNA, 19 nt, Artificial Sequence
  Synthetic Oligonucleotide
acugaggagggagcaaucg

SEQ ID NO: 9894 - RNA, 19 nt, Artificial Sequence
  Synthetic Oligonucleotide
accgaagagggacgaauug

SEQ ID NO: 9895 - RNA, 19 nt, Artificial Sequence
  Synthetic Oligonucleotide
acagaagagggagcaaucg

SEQ ID NO: 9896 - RNA, 19 nt, Artificial Sequence
  Synthetic Oligonucleotide
acagaagggggagcaaucg

SEQ ID NO: 9897 - RNA, 19 nt, Artificial Sequence
  Synthetic Oligonucleotide
acggaagaaggggcaauug

SEQ ID NO: 9898 - RNA, 19 nt, Artificial Sequence
  Synthetic Oligonucleotide
acagaagaaggagcaaucg

SEQ ID NO: 9899 - RNA, 19 nt, Artificial Sequence
  Synthetic Oligonucleotide
acagacgaaggagcaauug

SEQ ID NO: 9900 - RNA, 19 nt, Artificial Sequence
  Synthetic Oligonucleotide
caccgaagagggagcaguu

SEQ ID NO: 9901 - RNA, 19 nt, Artificial Sequence
  Synthetic Oligonucleotide
caccgaagagggaguaauu

SEQ ID NO: 9902 - RNA, 19 nt, Artificial Sequence
  Synthetic Oligonucleotide
caccgaagagggggcaauu

SEQ ID NO: 9903 - RNA, 19 nt, Artificial Sequence
  Synthetic Oligonucleotide
caccgaggagggagcaauu

SEQ ID NO: 9904 - RNA, 19 nt, Artificial Sequence
  Synthetic Oligonucleotide
cacugaagagggagcaauu

SEQ ID NO: 9905 - RNA, 19 nt, Artificial Sequence
  Synthetic Oligonucleotide
caucgaagagggagcaauu

SEQ ID NO: 9906 - RNA, 19 nt, Artificial Sequence
  Synthetic Oligonucleotide
uaccgaagagggagcaauu

SEQ ID NO: 9907 - RNA, 19 nt, Artificial Sequence
  Synthetic Oligonucleotide
caccgaagagggagcaauc

SEQ ID NO: 9908 - RNA, 19 nt, Artificial Sequence
  Synthetic Oligonucleotide
caccgaagagggaacaauu

SEQ ID NO: 9909 - RNA, 19 nt, Artificial Sequence
  Synthetic Oligonucleotide
caccgaagagggcgcaauu

SEQ ID NO: 9910 - RNA, 19 nt, Artificial Sequence
  Synthetic Oligonucleotide
caccgaagagggugcaauu

SEQ ID NO: 9911 - RNA, 19 nt, Artificial Sequence
  Synthetic Oligonucleotide
caccgaagaggaagcaauu

SEQ ID NO: 9912 - RNA, 19 nt, Artificial Sequence
  Synthetic Oligonucleotide
caccgaagaaggagcaauu

SEQ ID NO: 9913 - RNA, 19 nt, Artificial Sequence
  Synthetic Oligonucleotide
caccgaagauggagcaauu

SEQ ID NO: 9914 - RNA, 19 nt, Artificial Sequence
  Synthetic Oligonucleotide
caccgaagcgggagcaauu

SEQ ID NO: 9915 - RNA, 19 nt, Artificial Sequence
  Synthetic Oligonucleotide
caccgaaaagggagcaauu

SEQ ID NO: 9916 - RNA, 19 nt, Artificial Sequence
  Synthetic Oligonucleotide
caccaaagagggagcaauu

SEQ ID NO: 9917 - RNA, 19 nt, Artificial Sequence
  Synthetic Oligonucleotide
cacagaagagggagcaauu

SEQ ID NO: 9918 - RNA, 19 nt, Artificial Sequence
  Synthetic Oligonucleotide
caccgaagaggggacaauu

SEQ ID NO: 9919 - RNA, 19 nt, Artificial Sequence
  Synthetic Oligonucleotide
cacugaggagggagcaauc

SEQ ID NO: 9920 - RNA, 19 nt, Artificial Sequence
  Synthetic Oligonucleotide
caccgaagagggacgaauu

SEQ ID NO: 9921 - RNA, 19 nt, Artificial Sequence
  Synthetic Oligonucleotide
cacagaagagggagcaauc

SEQ ID NO: 9922 - RNA, 19 nt, Artificial Sequence
  Synthetic Oligonucleotide
cacagaagggggagcaauc

SEQ ID NO: 9923 - RNA, 19 nt, Artificial Sequence
  Synthetic Oligonucleotide
cacggaagaaggggcaauu

SEQ ID NO: 9924 - RNA, 19 nt, Artificial Sequence
  Synthetic Oligonucleotide
cacugaagaaggagcaauc

SEQ ID NO: 9925 - RNA, 19 nt, Artificial Sequence
  Synthetic Oligonucleotide
cacagaagaaggagcaauc

SEQ ID NO: 9926 - RNA, 19 nt, Artificial Sequence
  Synthetic Oligonucleotide
ccgaagagggagcaguugu

SEQ ID NO: 9927 - RNA, 19 nt, Artificial Sequence
  Synthetic Oligonucleotide
ccgaagagggaguaauugu

SEQ ID NO: 9928 - RNA, 19 nt, Artificial Sequence
  Synthetic Oligonucleotide
ccgaagagggggcaauugu

SEQ ID NO: 9929 - RNA, 19 nt, Artificial Sequence
  Synthetic Oligonucleotide
ccgaggagggagcaauugu

SEQ ID NO: 9930 - RNA, 19 nt, Artificial Sequence
  Synthetic Oligonucleotide
cugaagagggagcaauugu

SEQ ID NO: 9931 - RNA, 19 nt, Artificial Sequence
  Synthetic Oligonucleotide
ucgaagagggagcaauugu

SEQ ID NO: 9932 - RNA, 19 nt, Artificial Sequence
  Synthetic Oligonucleotide
ccgaagagggagcaauugc

SEQ ID NO: 9933 - RNA, 19 nt, Artificial Sequence
  Synthetic Oligonucleotide
ccgaagagggagcaauuau

SEQ ID NO: 9934 - RNA, 19 nt, Artificial Sequence
  Synthetic Oligonucleotide
ccgaagagggagcaaucgu

SEQ ID NO: 9935 - RNA, 19 nt, Artificial Sequence
  Synthetic Oligonucleotide
ccgaagagggaacaauugu

SEQ ID NO: 9936 - RNA, 19 nt, Artificial Sequence
  Synthetic Oligonucleotide
ccgaagagggcgcaauugu

SEQ ID NO: 9937 - RNA, 19 nt, Artificial Sequence
  Synthetic Oligonucleotide
ccgaagagggugcaauugu

SEQ ID NO: 9938 - RNA, 19 nt, Artificial Sequence
  Synthetic Oligonucleotide
ccgaagaggaagcaauugu

SEQ ID NO: 9939 - RNA, 19 nt, Artificial Sequence
  Synthetic Oligonucleotide
ccgaagaaggagcaauugu

SEQ ID NO: 9940 - RNA, 19 nt, Artificial Sequence
  Synthetic Oligonucleotide
ccgaagauggagcaauugu

SEQ ID NO: 9941 - RNA, 19 nt, Artificial Sequence
  Synthetic Oligonucleotide
ccgaagcgggagcaauugu

SEQ ID NO: 9942 - RNA, 19 nt, Artificial Sequence
  Synthetic Oligonucleotide
ccgaaaagggagcaauugu

SEQ ID NO: 9943 - RNA, 19 nt, Artificial Sequence
  Synthetic Oligonucleotide
ccaaagagggagcaauugu

SEQ ID NO: 9944 - RNA, 19 nt, Artificial Sequence
  Synthetic Oligonucleotide
cagaagagggagcaauugu

SEQ ID NO: 9945 - RNA, 19 nt, Artificial Sequence
  Synthetic Oligonucleotide
ccgaagaggggacaauugu

SEQ ID NO: 9946 - RNA, 19 nt, Artificial Sequence
  Synthetic Oligonucleotide
cugaggagggagcaaucgu

SEQ ID NO: 9947 - RNA, 19 nt, Artificial Sequence
  Synthetic Oligonucleotide
ccgaagagggacgaauugu

SEQ ID NO: 9948 - RNA, 19 nt, Artificial Sequence
  Synthetic Oligonucleotide
cagaagagggagcaaucgu

SEQ ID NO: 9949 - RNA, 19 nt, Artificial Sequence
  Synthetic Oligonucleotide
cagaagggggagcaaucgu

SEQ ID NO: 9950 - RNA, 19 nt, Artificial Sequence
  Synthetic Oligonucleotide
cggaagaaggggcaauugu

SEQ ID NO: 9951 - RNA, 19 nt, Artificial Sequence
  Synthetic Oligonucleotide
cagaagaaggagcaaucgu

SEQ ID NO: 9952 - RNA, 19 nt, Artificial Sequence
  Synthetic Oligonucleotide
cagacgaaggagcaauugu

SEQ ID NO: 9953 - RNA, 19 nt, Artificial Sequence
  Synthetic Oligonucleotide
cgaagagggagcaguuguu

SEQ ID NO: 9954 - RNA, 19 nt, Artificial Sequence
  Synthetic Oligonucleotide
cgaagagggaguaauuguu

SEQ ID NO: 9955 - RNA, 19 nt, Artificial Sequence
  Synthetic Oligonucleotide
cgaagagggggcaauuguu

SEQ ID NO: 9956 - RNA, 19 nt, Artificial Sequence
  Synthetic Oligonucleotide
cgaggagggagcaauuguu

SEQ ID NO: 9957 - RNA, 19 nt, Artificial Sequence
  Synthetic Oligonucleotide
ugaagagggagcaauuguu

SEQ ID NO: 9958 - RNA, 19 nt, Artificial Sequence
  Synthetic Oligonucleotide
cgaagagggagcaauugua

SEQ ID NO: 9959 - RNA, 19 nt, Artificial Sequence
  Synthetic Oligonucleotide
cgaagagggagcaauugug

SEQ ID NO: 9960 - RNA, 19 nt, Artificial Sequence
  Synthetic Oligonucleotide
cgaagagggagcaauugcu

SEQ ID NO: 9961 - RNA, 19 nt, Artificial Sequence
  Synthetic Oligonucleotide
cgaagagggagcaauuauu

SEQ ID NO: 9962 - RNA, 19 nt, Artificial Sequence
  Synthetic Oligonucleotide
cgaagagggagcaaucguu

SEQ ID NO: 9963 - RNA, 19 nt, Artificial Sequence
  Synthetic Oligonucleotide
cgaagagggaacaauuguu

SEQ ID NO: 9964 - RNA, 19 nt, Artificial Sequence
  Synthetic Oligonucleotide
cgaagagggcgcaauuguu

SEQ ID NO: 9965 - RNA, 19 nt, Artificial Sequence
  Synthetic Oligonucleotide
cgaagagggugcaauuguu

SEQ ID NO: 9966 - RNA, 19 nt, Artificial Sequence
  Synthetic Oligonucleotide
cgaagaggaagcaauuguu

SEQ ID NO: 9967 - RNA, 19 nt, Artificial Sequence
  Synthetic Oligonucleotide
cgaagaaggagcaauuguu

SEQ ID NO: 9968 - RNA, 19 nt, Artificial Sequence
  Synthetic Oligonucleotide
cgaagauggagcaauuguu

SEQ ID NO: 9969 - RNA, 19 nt, Artificial Sequence
  Synthetic Oligonucleotide
cgaagcgggagcaauuguu

SEQ ID NO: 9970 - RNA, 19 nt, Artificial Sequence
  Synthetic Oligonucleotide
cgaaaagggagcaauuguu

SEQ ID NO: 9971 - RNA, 19 nt, Artificial Sequence
  Synthetic Oligonucleotide
caaagagggagcaauuguu

SEQ ID NO: 9972 - RNA, 19 nt, Artificial Sequence
  Synthetic Oligonucleotide
agaagagggagcaauuguu

SEQ ID NO: 9973 - RNA, 19 nt, Artificial Sequence
  Synthetic Oligonucleotide
cgaagaggggacaauuguu

SEQ ID NO: 9974 - RNA, 19 nt, Artificial Sequence
  Synthetic Oligonucleotide
cgaggagggagcaauuguc

SEQ ID NO: 9975 - RNA, 19 nt, Artificial Sequence
  Synthetic Oligonucleotide
ugaggagggagcaaucguu

SEQ ID NO: 9976 - RNA, 19 nt, Artificial Sequence
  Synthetic Oligonucleotide
cgaagagggacgaauuguu

SEQ ID NO: 9977 - RNA, 19 nt, Artificial Sequence
  Synthetic Oligonucleotide
agaagagggagcaaucgug

SEQ ID NO: 9978 - RNA, 19 nt, Artificial Sequence
  Synthetic Oligonucleotide
agaagaaggagcaaucguu

SEQ ID NO: 9979 - RNA, 19 nt, Artificial Sequence
  Synthetic Oligonucleotide
auaagauggcugauugagg

SEQ ID NO: 9980 - RNA, 19 nt, Artificial Sequence
  Synthetic Oligonucleotide
auaagauggcugguugaag

SEQ ID NO: 9981 - RNA, 19 nt, Artificial Sequence
  Synthetic Oligonucleotide
auaagaugguugauugaag

SEQ ID NO: 9982 - RNA, 19 nt, Artificial Sequence
  Synthetic Oligonucleotide
auaagguggcugauugaag

SEQ ID NO: 9983 - RNA, 19 nt, Artificial Sequence
  Synthetic Oligonucleotide
augagauggcugauugaag

SEQ ID NO: 9984 - RNA, 19 nt, Artificial Sequence
  Synthetic Oligonucleotide
auaagguggcugauugagg

SEQ ID NO: 9985 - RNA, 19 nt, Artificial Sequence
  Synthetic Oligonucleotide
augagguggcugauugaag

SEQ ID NO: 9986 - RNA, 19 nt, Artificial Sequence
  Synthetic Oligonucleotide
auaagauggcugauagaag

SEQ ID NO: 9987 - RNA, 19 nt, Artificial Sequence
  Synthetic Oligonucleotide
auaagauggcugaucgaag

SEQ ID NO: 9988 - RNA, 19 nt, Artificial Sequence
  Synthetic Oligonucleotide
auaagauggcuaauugaag

SEQ ID NO: 9989 - RNA, 19 nt, Artificial Sequence
  Synthetic Oligonucleotide
auaawauggcugauugaag

SEQ ID NO: 9990 - RNA, 19 nt, Artificial Sequence
  Synthetic Oligonucleotide
auaagaugguuaauugaag

SEQ ID NO: 9991 - RNA, 19 nt, Artificial Sequence
  Synthetic Oligonucleotide
auaaggugguuaauugaag

SEQ ID NO: 9992 - RNA, 19 nt, Artificial Sequence
  Synthetic Oligonucleotide
uaagauggcugauugagga

SEQ ID NO: 9993 - RNA, 19 nt, Artificial Sequence
  Synthetic Oligonucleotide
uaagauggcugguugaaga

SEQ ID NO: 9994 - RNA, 19 nt, Artificial Sequence
  Synthetic Oligonucleotide
uaagaugguugauugaaga

SEQ ID NO: 9995 - RNA, 19 nt, Artificial Sequence
  Synthetic Oligonucleotide
uaagguggcugauugaaga

SEQ ID NO: 9996 - RNA, 19 nt, Artificial Sequence
  Synthetic Oligonucleotide
ugagauggcugauugaaga

SEQ ID NO: 9997 - RNA, 19 nt, Artificial Sequence
  Synthetic Oligonucleotide
uaagguggcugauugagga

SEQ ID NO: 9998 - RNA, 19 nt, Artificial Sequence
  Synthetic Oligonucleotide
ugagguggcugauugaaga

SEQ ID NO: 9999 - RNA, 19 nt, Artificial Sequence
  Synthetic Oligonucleotide
uaagauggcugauagaaga

SEQ ID NO: 10000 - RNA, 19 nt, Artificial Sequence
  Synthetic Oligonucleotide
uaagauggcugaucgaaga

SEQ ID NO: 10001 - RNA, 19 nt, Artificial Sequence
  Synthetic Oligonucleotide
uaagauggcuaauugaaga

SEQ ID NO: 10002 - RNA, 19 nt, Artificial Sequence
  Synthetic Oligonucleotide
uaawauggcugauugaaga

SEQ ID NO: 10003 - RNA, 19 nt, Artificial Sequence
  Synthetic Oligonucleotide
uaagaugguuaauugaaga

SEQ ID NO: 10004 - RNA, 19 nt, Artificial Sequence
  Synthetic Oligonucleotide
uaaggugguuaauugaaga

SEQ ID NO: 10005 - RNA, 19 nt, Artificial Sequence
  Synthetic Oligonucleotide
aagauggcugauugaagag

SEQ ID NO: 10006 - RNA, 19 nt, Artificial Sequence
  Synthetic Oligonucleotide
aagauggcugauugaggaa

SEQ ID NO: 10007 - RNA, 19 nt, Artificial Sequence
  Synthetic Oligonucleotide
aagauggcugguugaagaa

SEQ ID NO: 10008 - RNA, 19 nt, Artificial Sequence
  Synthetic Oligonucleotide
aagaugguugauugaagaa

SEQ ID NO: 10009 - RNA, 19 nt, Artificial Sequence
  Synthetic Oligonucleotide
aagguggcugauugaagaa

SEQ ID NO: 10010 - RNA, 19 nt, Artificial Sequence
  Synthetic Oligonucleotide
gagauggcugauugaagaa

SEQ ID NO: 10011 - RNA, 19 nt, Artificial Sequence
  Synthetic Oligonucleotide
aagguggcugauugaggaa

SEQ ID NO: 10012 - RNA, 19 nt, Artificial Sequence
  Synthetic Oligonucleotide
gagguggcugauugaagaa

SEQ ID NO: 10013 - RNA, 19 nt, Artificial Sequence
  Synthetic Oligonucleotide
aagauggcugauagaagaa

SEQ ID NO: 10014 - RNA, 19 nt, Artificial Sequence
  Synthetic Oligonucleotide
aagauggcugaucgaagaa

SEQ ID NO: 10015 - RNA, 19 nt, Artificial Sequence
  Synthetic Oligonucleotide
aagauggcuaauugaagaa

SEQ ID NO: 10016 - RNA, 19 nt, Artificial Sequence
  Synthetic Oligonucleotide
aawauggcugauugaagaa

SEQ ID NO: 10017 - RNA, 19 nt, Artificial Sequence
  Synthetic Oligonucleotide
aagaugguuaauugaagaa

SEQ ID NO: 10018 - RNA, 19 nt, Artificial Sequence
  Synthetic Oligonucleotide
aaggugguuaauugaagaa

SEQ ID NO: 10019 - RNA, 19 nt, Artificial Sequence
  Synthetic Oligonucleotide
uuacuaagggcuuucacug

SEQ ID NO: 10020 - RNA, 19 nt, Artificial Sequence
  Synthetic Oligonucleotide
uuacuaagggcuuucaucg

SEQ ID NO: 10021 - RNA, 19 nt, Artificial Sequence
  Synthetic Oligonucleotide
uuacuaagggcuuuuaccg

SEQ ID NO: 10022 - RNA, 19 nt, Artificial Sequence
  Synthetic Oligonucleotide
uuacugagggcuuucaccg

SEQ ID NO: 10023 - RNA, 19 nt, Artificial Sequence
  Synthetic Oligonucleotide
uuauuaagggcuuucaccg

SEQ ID NO: 10024 - RNA, 19 nt, Artificial Sequence
  Synthetic Oligonucleotide
uugcuaagggcuuucaccg

SEQ ID NO: 10025 - RNA, 19 nt, Artificial Sequence
  Synthetic Oligonucleotide
uuacuaagggcuuucacca

SEQ ID NO: 10026 - RNA, 19 nt, Artificial Sequence
  Synthetic Oligonucleotide
uuacuaagggcuuucacag

SEQ ID NO: 10027 - RNA, 19 nt, Artificial Sequence
  Synthetic Oligonucleotide
uuacuaagggcuaucaccg

SEQ ID NO: 10028 - RNA, 19 nt, Artificial Sequence
  Synthetic Oligonucleotide
uuacuaagggcucucaccg

SEQ ID NO: 10029 - RNA, 19 nt, Artificial Sequence
  Synthetic Oligonucleotide
uuacuaagggccuucaccg

SEQ ID NO: 10030 - RNA, 19 nt, Artificial Sequence
  Synthetic Oligonucleotide
uuacuaagggguuucaccg

SEQ ID NO: 10031 - RNA, 19 nt, Artificial Sequence
  Synthetic Oligonucleotide
uuacuaagagcuuucaccg

SEQ ID NO: 10032 - RNA, 19 nt, Artificial Sequence
  Synthetic Oligonucleotide
uuacuaaaggcuuucaccg

SEQ ID NO: 10033 - RNA, 19 nt, Artificial Sequence
  Synthetic Oligonucleotide
uuacuuagggcuuucaccg

SEQ ID NO: 10034 - RNA, 19 nt, Artificial Sequence
  Synthetic Oligonucleotide
uuacaaagggcuuucaccg

SEQ ID NO: 10035 - RNA, 19 nt, Artificial Sequence
  Synthetic Oligonucleotide
ucacuaagggcuuucaccg

SEQ ID NO: 10036 - RNA, 19 nt, Artificial Sequence
  Synthetic Oligonucleotide
cuacuaagggcuuucaccg

SEQ ID NO: 10037 - RNA, 19 nt, Artificial Sequence
  Synthetic Oligonucleotide
cuacuaagggcuuucacug

SEQ ID NO: 10038 - RNA, 19 nt, Artificial Sequence
  Synthetic Oligonucleotide
cuacuaagggccuucaccg

SEQ ID NO: 10039 - RNA, 19 nt, Artificial Sequence
  Synthetic Oligonucleotide
gauggcugauugaagaggu

SEQ ID NO: 10040 - RNA, 19 nt, Artificial Sequence
  Synthetic Oligonucleotide
gauggcugauugaggaagu

SEQ ID NO: 10041 - RNA, 19 nt, Artificial Sequence
  Synthetic Oligonucleotide
gauggcugguugaagaagu

SEQ ID NO: 10042 - RNA, 19 nt, Artificial Sequence
  Synthetic Oligonucleotide
gaugguugauugaagaagu

SEQ ID NO: 10043 - RNA, 19 nt, Artificial Sequence
  Synthetic Oligonucleotide
gguggcugauugaagaagu

SEQ ID NO: 10044 - RNA, 19 nt, Artificial Sequence
  Synthetic Oligonucleotide
gguggcugauugaggaagu

SEQ ID NO: 10045 - RNA, 19 nt, Artificial Sequence
  Synthetic Oligonucleotide
gauggcugauugaagaaau

SEQ ID NO: 10046 - RNA, 19 nt, Artificial Sequence
  Synthetic Oligonucleotide
gauggcugaucgaagaagu

SEQ ID NO: 10047 - RNA, 19 nt, Artificial Sequence
  Synthetic Oligonucleotide
gauggcuaauugaagaagu

SEQ ID NO: 10048 - RNA, 19 nt, Artificial Sequence
  Synthetic Oligonucleotide
wauggcugauugaagaagu

SEQ ID NO: 10049 - RNA, 19 nt, Artificial Sequence
  Synthetic Oligonucleotide
gauggcugauugaggaaau

SEQ ID NO: 10050 - RNA, 19 nt, Artificial Sequence
  Synthetic Oligonucleotide
gaugguuaauugaagaagu

SEQ ID NO: 10051 - RNA, 19 nt, Artificial Sequence
  Synthetic Oligonucleotide
gguggcugauugaagaaau

SEQ ID NO: 10052 - RNA, 19 nt, Artificial Sequence
  Synthetic Oligonucleotide
gguggcugauugaagaauu

SEQ ID NO: 10053 - RNA, 19 nt, Artificial Sequence
  Synthetic Oligonucleotide
ggugguuaauugaagaagu

SEQ ID NO: 10054 - RNA, 19 nt, Artificial Sequence
  Synthetic Oligonucleotide
gauggcugauagaagaaau

SEQ ID NO: 10055 - RNA, 19 nt, Artificial Sequence
  Synthetic Oligonucleotide
gaugguuaauugaagaaau

SEQ ID NO: 10056 - RNA, 19 nt, Artificial Sequence
  Synthetic Oligonucleotide
agauggcugauugaagagg

SEQ ID NO: 10057 - RNA, 19 nt, Artificial Sequence
  Synthetic Oligonucleotide
agauggcugauugaggaag

SEQ ID NO: 10058 - RNA, 19 nt, Artificial Sequence
  Synthetic Oligonucleotide
agauggcugguugaagaag

SEQ ID NO: 10059 - RNA, 19 nt, Artificial Sequence
  Synthetic Oligonucleotide
agaugguugauugaagaag

SEQ ID NO: 10060 - RNA, 19 nt, Artificial Sequence
  Synthetic Oligonucleotide
agguggcugauugaagaag

SEQ ID NO: 10061 - RNA, 19 nt, Artificial Sequence
  Synthetic Oligonucleotide
agguggcugauugaggaag

SEQ ID NO: 10062 - RNA, 19 nt, Artificial Sequence
  Synthetic Oligonucleotide
agauggcugauugaagaaa

SEQ ID NO: 10063 - RNA, 19 nt, Artificial Sequence
  Synthetic Oligonucleotide
agauggcugaucgaagaag

SEQ ID NO: 10064 - RNA, 19 nt, Artificial Sequence
  Synthetic Oligonucleotide
agauggcuaauugaagaag

SEQ ID NO: 10065 - RNA, 19 nt, Artificial Sequence
  Synthetic Oligonucleotide
awauggcugauugaagaag

SEQ ID NO: 10066 - RNA, 19 nt, Artificial Sequence
  Synthetic Oligonucleotide
agauggcugauugaggaaa

SEQ ID NO: 10067 - RNA, 19 nt, Artificial Sequence
  Synthetic Oligonucleotide
agaugguuaauugaagaag

SEQ ID NO: 10068 - RNA, 19 nt, Artificial Sequence
  Synthetic Oligonucleotide
agguggcugauugaagaaa

SEQ ID NO: 10069 - RNA, 19 nt, Artificial Sequence
  Synthetic Oligonucleotide
agguggcugauugaagaau

SEQ ID NO: 10070 - RNA, 19 nt, Artificial Sequence
  Synthetic Oligonucleotide
aggugguuaauugaagaag

SEQ ID NO: 10071 - RNA, 19 nt, Artificial Sequence
  Synthetic Oligonucleotide
agauggcugauagaagaaa

SEQ ID NO: 10072 - RNA, 19 nt, Artificial Sequence
  Synthetic Oligonucleotide
agaugguuaauugaagaaa

SEQ ID NO: 10073 - RNA, 19 nt, Artificial Sequence
  Synthetic Oligonucleotide
ccuugaucggcuucgccgg

SEQ ID NO: 10074 - RNA, 19 nt, Artificial Sequence
  Synthetic Oligonucleotide
ccuugaucggcuucgucga

SEQ ID NO: 10075 - RNA, 19 nt, Artificial Sequence
  Synthetic Oligonucleotide
ucuugaucggcuucgccga

SEQ ID NO: 10076 - RNA, 19 nt, Artificial Sequence
  Synthetic Oligonucleotide
ccuugaucggcuucgcaga

SEQ ID NO: 10077 - RNA, 19 nt, Artificial Sequence
  Synthetic Oligonucleotide
ccuugaucggcuucaccga

SEQ ID NO: 10078 - RNA, 19 nt, Artificial Sequence
  Synthetic Oligonucleotide
ccuugaucggcuuagccga

SEQ ID NO: 10079 - RNA, 19 nt, Artificial Sequence
  Synthetic Oligonucleotide
ccuugaucggcuccgccga

SEQ ID NO: 10080 - RNA, 19 nt, Artificial Sequence
  Synthetic Oligonucleotide
ccuugaucggauucgccga

SEQ ID NO: 10081 - RNA, 19 nt, Artificial Sequence
  Synthetic Oligonucleotide
ccuugaucgacuucgccga

SEQ ID NO: 10082 - RNA, 19 nt, Artificial Sequence
  Synthetic Oligonucleotide
ccuugauaggcuucgccga

SEQ ID NO: 10083 - RNA, 19 nt, Artificial Sequence
  Synthetic Oligonucleotide
ccuugaccggcuucgccga

SEQ ID NO: 10084 - RNA, 19 nt, Artificial Sequence
  Synthetic Oligonucleotide
ccucgaucggcuucgccga

SEQ ID NO: 10085 - RNA, 19 nt, Artificial Sequence
  Synthetic Oligonucleotide
cauugaucggcuucgccga

SEQ ID NO: 10086 - RNA, 19 nt, Artificial Sequence
  Synthetic Oligonucleotide
ccuugaccggcuucgucga

SEQ ID NO: 10087 - RNA, 19 nt, Artificial Sequence
  Synthetic Oligonucleotide
ucucgaucggcuucgccga

SEQ ID NO: 10088 - RNA, 19 nt, Artificial Sequence
  Synthetic Oligonucleotide
ccuugaucgacuucgcaga

SEQ ID NO: 10089 - RNA, 19 nt, Artificial Sequence
  Synthetic Oligonucleotide
ccuugauagacuucgccga

SEQ ID NO: 10090 - RNA, 19 nt, Artificial Sequence
  Synthetic Oligonucleotide
cauugaccggcuucgccga

SEQ ID NO: 10091 - RNA, 19 nt, Artificial Sequence
  Synthetic Oligonucleotide
ccuugaccggguuugccga

SEQ ID NO: 10092 - RNA, 19 nt, Artificial Sequence
  Synthetic Oligonucleotide
aaagcgaauuucagugugg

SEQ ID NO: 10093 - RNA, 19 nt, Artificial Sequence
  Synthetic Oligonucleotide
aaagcgaauuuuaguguga

SEQ ID NO: 10094 - RNA, 19 nt, Artificial Sequence
  Synthetic Oligonucleotide
aaggcgaauuucaguguga

SEQ ID NO: 10095 - RNA, 19 nt, Artificial Sequence
  Synthetic Oligonucleotide
agagcgaauuucaguguga

SEQ ID NO: 10096 - RNA, 19 nt, Artificial Sequence
  Synthetic Oligonucleotide
aaagcgaauuucaguguaa

SEQ ID NO: 10097 - RNA, 19 nt, Artificial Sequence
  Synthetic Oligonucleotide
aaagcgaauuucaguauga

SEQ ID NO: 10098 - RNA, 19 nt, Artificial Sequence
  Synthetic Oligonucleotide
aaagcgaauuucagcguga

SEQ ID NO: 10099 - RNA, 19 nt, Artificial Sequence
  Synthetic Oligonucleotide
aaagcgaauuucaauguga

SEQ ID NO: 10100 - RNA, 19 nt, Artificial Sequence
  Synthetic Oligonucleotide
aaagcgaauaucaguguga

SEQ ID NO: 10101 - RNA, 19 nt, Artificial Sequence
  Synthetic Oligonucleotide
aaagcgaacuucaguguga

SEQ ID NO: 10102 - RNA, 19 nt, Artificial Sequence
  Synthetic Oligonucleotide
aaagcaaauuucaguguga

SEQ ID NO: 10103 - RNA, 19 nt, Artificial Sequence
  Synthetic Oligonucleotide
aaagcuaauuucaguguga

SEQ ID NO: 10104 - RNA, 19 nt, Artificial Sequence
  Synthetic Oligonucleotide
aaagcgaacuucagugugg

SEQ ID NO: 10105 - RNA, 19 nt, Artificial Sequence
  Synthetic Oligonucleotide
aaagcaaacuucaguguga

SEQ ID NO: 10106 - RNA, 19 nt, Artificial Sequence
  Synthetic Oligonucleotide
aaagcaaacuuuaguguga

SEQ ID NO: 10107 - RNA, 19 nt, Artificial Sequence
  Synthetic Oligonucleotide
aaggcaaacuucaguguga

SEQ ID NO: 10108 - RNA, 19 nt, Artificial Sequence
  Synthetic Oligonucleotide
aaagcaaacuucaguguaa

SEQ ID NO: 10109 - RNA, 19 nt, Artificial Sequence
  Synthetic Oligonucleotide
aaagcaaacuucagugcga

SEQ ID NO: 10110 - RNA, 19 nt, Artificial Sequence
  Synthetic Oligonucleotide
aagcgaauuucaguguggu

SEQ ID NO: 10111 - RNA, 19 nt, Artificial Sequence
  Synthetic Oligonucleotide
aagcgaauuuuagugugau

SEQ ID NO: 10112 - RNA, 19 nt, Artificial Sequence
  Synthetic Oligonucleotide
aggcgaauuucagugugau

SEQ ID NO: 10113 - RNA, 19 nt, Artificial Sequence
  Synthetic Oligonucleotide
gagcgaauuucagugugau

SEQ ID NO: 10114 - RNA, 19 nt, Artificial Sequence
  Synthetic Oligonucleotide
aagcgaauuucagugugac

SEQ ID NO: 10115 - RNA, 19 nt, Artificial Sequence
  Synthetic Oligonucleotide
aagcgaauuucaguguaau

SEQ ID NO: 10116 - RNA, 19 nt, Artificial Sequence
  Synthetic Oligonucleotide
aagcgaauuucaguaugau

SEQ ID NO: 10117 - RNA, 19 nt, Artificial Sequence
  Synthetic Oligonucleotide
aagcgaauuucagcgugau

SEQ ID NO: 10118 - RNA, 19 nt, Artificial Sequence
  Synthetic Oligonucleotide
aagcgaauuucaaugugau

SEQ ID NO: 10119 - RNA, 19 nt, Artificial Sequence
  Synthetic Oligonucleotide
aagcgaauaucagugugau

SEQ ID NO: 10120 - RNA, 19 nt, Artificial Sequence
  Synthetic Oligonucleotide
aagcgaacuucagugugau

SEQ ID NO: 10121 - RNA, 19 nt, Artificial Sequence
  Synthetic Oligonucleotide
aagcaaauuucagugugau

SEQ ID NO: 10122 - RNA, 19 nt, Artificial Sequence
  Synthetic Oligonucleotide
aagcuaauuucagugugau

SEQ ID NO: 10123 - RNA, 19 nt, Artificial Sequence
  Synthetic Oligonucleotide
aagcgaacuucaguguggu

SEQ ID NO: 10124 - RNA, 19 nt, Artificial Sequence
  Synthetic Oligonucleotide
aagcgaacuucagugugaa

SEQ ID NO: 10125 - RNA, 19 nt, Artificial Sequence
  Synthetic Oligonucleotide
aagcaaacuucagugugau

SEQ ID NO: 10126 - RNA, 19 nt, Artificial Sequence
  Synthetic Oligonucleotide
aagcaaacuuuagugugau

SEQ ID NO: 10127 - RNA, 19 nt, Artificial Sequence
  Synthetic Oligonucleotide
aggcaaacuucagugugau

SEQ ID NO: 10128 - RNA, 19 nt, Artificial Sequence
  Synthetic Oligonucleotide
aagcaaacuucagugugac

SEQ ID NO: 10129 - RNA, 19 nt, Artificial Sequence
  Synthetic Oligonucleotide
aagcaaacuucaguguaau

SEQ ID NO: 10130 - RNA, 19 nt, Artificial Sequence
  Synthetic Oligonucleotide
aagcaaacuucagugcgau

SEQ ID NO: 10131 - RNA, 19 nt, Artificial Sequence
  Synthetic Oligonucleotide
auuacuaagggcuuucacu

SEQ ID NO: 10132 - RNA, 19 nt, Artificial Sequence
  Synthetic Oligonucleotide
auuacuaagggcuuucauc

SEQ ID NO: 10133 - RNA, 19 nt, Artificial Sequence
  Synthetic Oligonucleotide
auuacuaagggcuuuuacc

SEQ ID NO: 10134 - RNA, 19 nt, Artificial Sequence
  Synthetic Oligonucleotide
auuacugagggcuuucacc

SEQ ID NO: 10135 - RNA, 19 nt, Artificial Sequence
  Synthetic Oligonucleotide
auuauuaagggcuuucacc

SEQ ID NO: 10136 - RNA, 19 nt, Artificial Sequence
  Synthetic Oligonucleotide
auugcuaagggcuuucacc

SEQ ID NO: 10137 - RNA, 19 nt, Artificial Sequence
  Synthetic Oligonucleotide
guuacuaagggcuuucacc

SEQ ID NO: 10138 - RNA, 19 nt, Artificial Sequence
  Synthetic Oligonucleotide
auuacuaagggcuuucaca

SEQ ID NO: 10139 - RNA, 19 nt, Artificial Sequence
  Synthetic Oligonucleotide
auuacuaagggcuaucacc

SEQ ID NO: 10140 - RNA, 19 nt, Artificial Sequence
  Synthetic Oligonucleotide
auuacuaagggcucucacc

SEQ ID NO: 10141 - RNA, 19 nt, Artificial Sequence
  Synthetic Oligonucleotide
auuacuaagggccuucacc

SEQ ID NO: 10142 - RNA, 19 nt, Artificial Sequence
  Synthetic Oligonucleotide
auuacuaagggguuucacc

SEQ ID NO: 10143 - RNA, 19 nt, Artificial Sequence
  Synthetic Oligonucleotide
auuacuaagagcuuucacc

SEQ ID NO: 10144 - RNA, 19 nt, Artificial Sequence
  Synthetic Oligonucleotide
auuacuaaaggcuuucacc

SEQ ID NO: 10145 - RNA, 19 nt, Artificial Sequence
  Synthetic Oligonucleotide
auuacuuagggcuuucacc

SEQ ID NO: 10146 - RNA, 19 nt, Artificial Sequence
  Synthetic Oligonucleotide
auuacaaagggcuuucacc

SEQ ID NO: 10147 - RNA, 19 nt, Artificial Sequence
  Synthetic Oligonucleotide
aucacuaagggcuuucacc

SEQ ID NO: 10148 - RNA, 19 nt, Artificial Sequence
  Synthetic Oligonucleotide
acuacuaagggcuuucacc

SEQ ID NO: 10149 - RNA, 19 nt, Artificial Sequence
  Synthetic Oligonucleotide
uuuacuaagggcuuucacc

SEQ ID NO: 10150 - RNA, 19 nt, Artificial Sequence
  Synthetic Oligonucleotide
acuacuaagggcuuucacu

SEQ ID NO: 10151 - RNA, 19 nt, Artificial Sequence
  Synthetic Oligonucleotide
acuacuaagggccuucacc

SEQ ID NO: 10152 - RNA, 25 nt, Artificial Sequence
  Synthetic Oligonucleotide
agcauacuuacugacagucagacag

SEQ ID NO: 10153 - RNA, 25 nt, Artificial Sequence
  Synthetic Oligonucleotide
agcauacuuacugauagccagacag

SEQ ID NO: 10154 - RNA, 25 nt, Artificial Sequence
  Synthetic Oligonucleotide
agcauacuuaccgacagccagacag

SEQ ID NO: 10155 - RNA, 25 nt, Artificial Sequence
  Synthetic Oligonucleotide
agcagacuuacugacagccagacag

SEQ ID NO: 10156 - RNA, 25 nt, Artificial Sequence
  Synthetic Oligonucleotide
aacauacuuacugacagccagacag

SEQ ID NO: 10157 - RNA, 25 nt, Artificial Sequence
  Synthetic Oligonucleotide
agcaugcuuacugacagccagacga

SEQ ID NO: 10158 - RNA, 25 nt, Artificial Sequence
  Synthetic Oligonucleotide
uacugacagucagacagcgaccaaa

SEQ ID NO: 10159 - RNA, 25 nt, Artificial Sequence
  Synthetic Oligonucleotide
uacugauagccagacagcgaccaaa

SEQ ID NO: 10160 - RNA, 25 nt, Artificial Sequence
  Synthetic Oligonucleotide
uaccgacagccagacagcgaccaaa

SEQ ID NO: 10161 - RNA, 25 nt, Artificial Sequence
  Synthetic Oligonucleotide
uacugacagccagacgacgaucaaa

SEQ ID NO: 10162 - RNA, 25 nt, Artificial Sequence
  Synthetic Oligonucleotide
cauacuuacugacagucagacagcg

SEQ ID NO: 10163 - RNA, 25 nt, Artificial Sequence
  Synthetic Oligonucleotide
cauacuuacugauagccagacagcg

SEQ ID NO: 10164 - RNA, 25 nt, Artificial Sequence
  Synthetic Oligonucleotide
cauacuuaccgacagccagacagcg

SEQ ID NO: 10165 - RNA, 25 nt, Artificial Sequence
  Synthetic Oligonucleotide
cagacuuacugacagccagacagcg

SEQ ID NO: 10166 - RNA, 25 nt, Artificial Sequence
  Synthetic Oligonucleotide
caugcuuacugacagccagacgacg

SEQ ID NO: 10167 - RNA, 25 nt, Artificial Sequence
  Synthetic Oligonucleotide
cuuacugacagccagacagcgccaa

SEQ ID NO: 10168 - RNA, 25 nt, Artificial Sequence
  Synthetic Oligonucleotide
cuuacugacagucagacagcgacca

SEQ ID NO: 10169 - RNA, 25 nt, Artificial Sequence
  Synthetic Oligonucleotide
cuuacugauagccagacagcgacca

SEQ ID NO: 10170 - RNA, 25 nt, Artificial Sequence
  Synthetic Oligonucleotide
cuuaccgacagccagacagcgacca

SEQ ID NO: 10171 - RNA, 25 nt, Artificial Sequence
  Synthetic Oligonucleotide
cuuacugacagccagacgacgauca

SEQ ID NO: 10172 - RNA, 25 nt, Artificial Sequence
  Synthetic Oligonucleotide
uuacugacagccagacagcgccaaa

SEQ ID NO: 10173 - RNA, 25 nt, Artificial Sequence
  Synthetic Oligonucleotide
uuacugacagucagacagcgaccaa

SEQ ID NO: 10174 - RNA, 25 nt, Artificial Sequence
  Synthetic Oligonucleotide
uuacugauagccagacagcgaccaa

SEQ ID NO: 10175 - RNA, 25 nt, Artificial Sequence
  Synthetic Oligonucleotide
uuaccgacagccagacagcgaccaa

SEQ ID NO: 10176 - RNA, 25 nt, Artificial Sequence
  Synthetic Oligonucleotide
uuacugacagccagacgacgaucaa

SEQ ID NO: 10177 - RNA, 25 nt, Artificial Sequence
  Synthetic Oligonucleotide
acuuacugacagccagacagcgcca

SEQ ID NO: 10178 - RNA, 25 nt, Artificial Sequence
  Synthetic Oligonucleotide
acuuacugacagucagacagcgacc

SEQ ID NO: 10179 - RNA, 25 nt, Artificial Sequence
  Synthetic Oligonucleotide
acuuacugauagccagacagcgacc

SEQ ID NO: 10180 - RNA, 25 nt, Artificial Sequence
  Synthetic Oligonucleotide
acuuaccgacagccagacagcgacc

SEQ ID NO: 10181 - RNA, 25 nt, Artificial Sequence
  Synthetic Oligonucleotide
gcuuacugacagccagacgacgauc

SEQ ID NO: 10182 - RNA, 25 nt, Artificial Sequence
  Synthetic Oligonucleotide
gcauacuuacugacagucagacagc

SEQ ID NO: 10183 - RNA, 25 nt, Artificial Sequence
  Synthetic Oligonucleotide
gcauacuuacugauagccagacagc

SEQ ID NO: 10184 - RNA, 25 nt, Artificial Sequence
  Synthetic Oligonucleotide
gcauacuuaccgacagccagacagc

SEQ ID NO: 10185 - RNA, 25 nt, Artificial Sequence
  Synthetic Oligonucleotide
gcagacuuacugacagccagacagc

SEQ ID NO: 10186 - RNA, 25 nt, Artificial Sequence
  Synthetic Oligonucleotide
acauacuuacugacagccagacagc

SEQ ID NO: 10187 - RNA, 25 nt, Artificial Sequence
  Synthetic Oligonucleotide
gcaugcuuacugacagccagacgac

SEQ ID NO: 10188 - RNA, 25 nt, Artificial Sequence
  Synthetic Oligonucleotide
cugacagccagacagcgaccaaagg

SEQ ID NO: 10189 - RNA, 25 nt, Artificial Sequence
  Synthetic Oligonucleotide
cugacagucagacagcgaccaaaag

SEQ ID NO: 10190 - RNA, 25 nt, Artificial Sequence
  Synthetic Oligonucleotide
cugauagccagacagcgaccaaaag

SEQ ID NO: 10191 - RNA, 25 nt, Artificial Sequence
  Synthetic Oligonucleotide
ccgacagccagacagcgaccaaaag

SEQ ID NO: 10192 - RNA, 25 nt, Artificial Sequence
  Synthetic Oligonucleotide
cugacagccagacgacgaucaaaag

SEQ ID NO: 10193 - RNA, 25 nt, Artificial Sequence
  Synthetic Oligonucleotide
auacuuacugacagccagacagcgc

SEQ ID NO: 10194 - RNA, 25 nt, Artificial Sequence
  Synthetic Oligonucleotide
auacuuacugacagucagacagcga

SEQ ID NO: 10195 - RNA, 25 nt, Artificial Sequence
  Synthetic Oligonucleotide
auacuuacugauagccagacagcga

SEQ ID NO: 10196 - RNA, 25 nt, Artificial Sequence
  Synthetic Oligonucleotide
auacuuaccgacagccagacagcga

SEQ ID NO: 10197 - RNA, 25 nt, Artificial Sequence
  Synthetic Oligonucleotide
agacuuacugacagccagacagcga

SEQ ID NO: 10198 - RNA, 25 nt, Artificial Sequence
  Synthetic Oligonucleotide
augcuuacugacagccagacgacga

SEQ ID NO: 10199 - RNA, 25 nt, Artificial Sequence
  Synthetic Oligonucleotide
acugacagccagacagcgaccaaag

SEQ ID NO: 10200 - RNA, 25 nt, Artificial Sequence
  Synthetic Oligonucleotide
acugacagucagacagcgaccaaaa

SEQ ID NO: 10201 - RNA, 25 nt, Artificial Sequence
  Synthetic Oligonucleotide
acugauagccagacagcgaccaaaa

SEQ ID NO: 10202 - RNA, 25 nt, Artificial Sequence
  Synthetic Oligonucleotide
accgacagccagacagcgaccaaaa

SEQ ID NO: 10203 - RNA, 25 nt, Artificial Sequence
  Synthetic Oligonucleotide
acugacagccagacgacgaucaaaa

SEQ ID NO: 10204 - RNA, 25 nt, Artificial Sequence
  Synthetic Oligonucleotide
uacuuacugacagccagacagcgcc

SEQ ID NO: 10205 - RNA, 25 nt, Artificial Sequence
  Synthetic Oligonucleotide
uacuuacugacagucagacagcgac

SEQ ID NO: 10206 - RNA, 25 nt, Artificial Sequence
  Synthetic Oligonucleotide
uacuuacugauagccagacagcgac

SEQ ID NO: 10207 - RNA, 25 nt, Artificial Sequence
  Synthetic Oligonucleotide
uacuuaccgacagccagacagcgac

SEQ ID NO: 10208 - RNA, 25 nt, Artificial Sequence
  Synthetic Oligonucleotide
gacuuacugacagccagacagcgac

SEQ ID NO: 10209 - RNA, 25 nt, Artificial Sequence
  Synthetic Oligonucleotide
ugcuuacugacagccagacgacgau

SEQ ID NO: 10210 - RNA, 25 nt, Artificial Sequence
  Synthetic Oligonucleotide
agccagacagcgaccaaaaggauuc

SEQ ID NO: 10211 - RNA, 25 nt, Artificial Sequence
  Synthetic Oligonucleotide
agccagacagcgaccaaaagaguuc

SEQ ID NO: 10212 - RNA, 25 nt, Artificial Sequence
  Synthetic Oligonucleotide
agccagacagcgaccaaaagaaguc

SEQ ID NO: 10213 - RNA, 25 nt, Artificial Sequence
  Synthetic Oligonucleotide
agccagacagcgaccaaaagauuuc

SEQ ID NO: 10214 - RNA, 25 nt, Artificial Sequence
  Synthetic Oligonucleotide
agucagacagcgaccaaaagaauuc

SEQ ID NO: 10215 - RNA, 25 nt, Artificial Sequence
  Synthetic Oligonucleotide
agccagacagcgaccaaaggaauuc

SEQ ID NO: 10216 - RNA, 25 nt, Artificial Sequence
  Synthetic Oligonucleotide
agccagacgacgaucaaaagaauuc

SEQ ID NO: 10217 - RNA, 25 nt, Artificial Sequence
  Synthetic Oligonucleotide
gccagacagcgaccaaaaggauucg

SEQ ID NO: 10218 - RNA, 25 nt, Artificial Sequence
  Synthetic Oligonucleotide
gccagacagcgaccaaaagaguucg

SEQ ID NO: 10219 - RNA, 25 nt, Artificial Sequence
  Synthetic Oligonucleotide
gccagacagcgaccaaaagaagucg

SEQ ID NO: 10220 - RNA, 25 nt, Artificial Sequence
  Synthetic Oligonucleotide
gccagacagcgaccaaaagauuucg

SEQ ID NO: 10221 - RNA, 25 nt, Artificial Sequence
  Synthetic Oligonucleotide
gucagacagcgaccaaaagaauucg

SEQ ID NO: 10222 - RNA, 25 nt, Artificial Sequence
  Synthetic Oligonucleotide
gccagacagcgaccaaaggaauucg

SEQ ID NO: 10223 - RNA, 25 nt, Artificial Sequence
  Synthetic Oligonucleotide
gucagacagcgaccaaaagaauucc

SEQ ID NO: 10224 - RNA, 25 nt, Artificial Sequence
  Synthetic Oligonucleotide
gccagacgacgaucaaaagaauucg

SEQ ID NO: 10225 - RNA, 25 nt, Artificial Sequence
  Synthetic Oligonucleotide
gacagccagacagcgaccaaaagga

SEQ ID NO: 10226 - RNA, 25 nt, Artificial Sequence
  Synthetic Oligonucleotide
gacagccagacagcgaccaaaagag

SEQ ID NO: 10227 - RNA, 25 nt, Artificial Sequence
  Synthetic Oligonucleotide
gacagccagacagcgaccaaaggaa

SEQ ID NO: 10228 - RNA, 25 nt, Artificial Sequence
  Synthetic Oligonucleotide
gacagccagacagcgaccaaaagau

SEQ ID NO: 10229 - RNA, 25 nt, Artificial Sequence
  Synthetic Oligonucleotide
gacagucagacagcgaccaaaagaa

SEQ ID NO: 10230 - RNA, 25 nt, Artificial Sequence
  Synthetic Oligonucleotide
gauagccagacagcgaccaaaagaa

SEQ ID NO: 10231 - RNA, 25 nt, Artificial Sequence
  Synthetic Oligonucleotide
gacagccagacgacgaucaaaagaa

SEQ ID NO: 10232 - RNA, 25 nt, Artificial Sequence
  Synthetic Oligonucleotide
ugacagccagacagcgaccaaaagg

SEQ ID NO: 10233 - RNA, 25 nt, Artificial Sequence
  Synthetic Oligonucleotide
ugacagccagacagcgaccaaagga

SEQ ID NO: 10234 - RNA, 25 nt, Artificial Sequence
  Synthetic Oligonucleotide
ugacagucagacagcgaccaaaaga

SEQ ID NO: 10235 - RNA, 25 nt, Artificial Sequence
  Synthetic Oligonucleotide
ugauagccagacagcgaccaaaaga

SEQ ID NO: 10236 - RNA, 25 nt, Artificial Sequence
  Synthetic Oligonucleotide
cgacagccagacagcgaccaaaaga

SEQ ID NO: 10237 - RNA, 25 nt, Artificial Sequence
  Synthetic Oligonucleotide
ugacagccagacgacgaucaaaaga

SEQ ID NO: 10238 - RNA, 25 nt, Artificial Sequence
  Synthetic Oligonucleotide
acagccagacagcgaccaaaaggau

SEQ ID NO: 10239 - RNA, 25 nt, Artificial Sequence
  Synthetic Oligonucleotide
acagccagacagcgaccaaaagagu

SEQ ID NO: 10240 - RNA, 25 nt, Artificial Sequence
  Synthetic Oligonucleotide
acagccagacagcgaccaaaggaau

SEQ ID NO: 10241 - RNA, 25 nt, Artificial Sequence
  Synthetic Oligonucleotide
acagccagacagcgaccaaaagaag

SEQ ID NO: 10242 - RNA, 25 nt, Artificial Sequence
  Synthetic Oligonucleotide
acagccagacagcgaccaaaagauu

SEQ ID NO: 10243 - RNA, 25 nt, Artificial Sequence
  Synthetic Oligonucleotide
acagucagacagcgaccaaaagaau

SEQ ID NO: 10244 - RNA, 25 nt, Artificial Sequence
  Synthetic Oligonucleotide
auagccagacagcgaccaaaagaau

SEQ ID NO: 10245 - RNA, 25 nt, Artificial Sequence
  Synthetic Oligonucleotide
acagccagacgacgaucaaaagaau

SEQ ID NO: 10246 - RNA, 25 nt, Artificial Sequence
  Synthetic Oligonucleotide
cagccagacagcgaccaaaaggauu

SEQ ID NO: 10247 - RNA, 25 nt, Artificial Sequence
  Synthetic Oligonucleotide
cagccagacagcgaccaaaagaguu

SEQ ID NO: 10248 - RNA, 25 nt, Artificial Sequence
  Synthetic Oligonucleotide
cagccagacagcgaccaaaggaauu

SEQ ID NO: 10249 - RNA, 25 nt, Artificial Sequence
  Synthetic Oligonucleotide
cagccagacagcgaccaaaagaagu

SEQ ID NO: 10250 - RNA, 25 nt, Artificial Sequence
  Synthetic Oligonucleotide
cagccagacagcgaccaaaagauuu

SEQ ID NO: 10251 - RNA, 25 nt, Artificial Sequence
  Synthetic Oligonucleotide
cagucagacagcgaccaaaagaauu

SEQ ID NO: 10252 - RNA, 25 nt, Artificial Sequence
  Synthetic Oligonucleotide
uagccagacagcgaccaaaagaauu

SEQ ID NO: 10253 - RNA, 25 nt, Artificial Sequence
  Synthetic Oligonucleotide
cagccagacgacgaucaaaagaauu

SEQ ID NO: 10254 - RNA, 25 nt, Artificial Sequence
  Synthetic Oligonucleotide
uagcauacuuacugacagucagaca

SEQ ID NO: 10255 - RNA, 25 nt, Artificial Sequence
  Synthetic Oligonucleotide
uagcauacuuacugauagccagaca

SEQ ID NO: 10256 - RNA, 25 nt, Artificial Sequence
  Synthetic Oligonucleotide
uagcaugcuuacugacagccagacg

SEQ ID NO: 10257 - RNA, 25 nt, Artificial Sequence
  Synthetic Oligonucleotide
cagcauacuuacugacagccagaca

SEQ ID NO: 10258 - RNA, 25 nt, Artificial Sequence
  Synthetic Oligonucleotide
uagcauacuuaccgacagccagaca

SEQ ID NO: 10259 - RNA, 25 nt, Artificial Sequence
  Synthetic Oligonucleotide
uagcagacuuacugacagccagaca

SEQ ID NO: 10260 - RNA, 25 nt, Artificial Sequence
  Synthetic Oligonucleotide
uaacauacuuacugacagccagaca

SEQ ID NO: 10261 - RNA, 25 nt, Artificial Sequence
  Synthetic Oligonucleotide
acucuagcauacuuacugacaguca

SEQ ID NO: 10262 - RNA, 25 nt, Artificial Sequence
  Synthetic Oligonucleotide
acucuagcauacuuacugauagcca

SEQ ID NO: 10263 - RNA, 25 nt, Artificial Sequence
  Synthetic Oligonucleotide
acuuuagcauacuuacugacagcca

SEQ ID NO: 10264 - RNA, 25 nt, Artificial Sequence
  Synthetic Oligonucleotide
acucuagcaugcuuacugacagcca

SEQ ID NO: 10265 - RNA, 25 nt, Artificial Sequence
  Synthetic Oligonucleotide
acuccagcauacuuacugacagcca

SEQ ID NO: 10266 - RNA, 25 nt, Artificial Sequence
  Synthetic Oligonucleotide
acucuagcauacuuaccgacagcca

SEQ ID NO: 10267 - RNA, 25 nt, Artificial Sequence
  Synthetic Oligonucleotide
acucuagcagacuuacugacagcca

SEQ ID NO: 10268 - RNA, 25 nt, Artificial Sequence
  Synthetic Oligonucleotide
acucuaacauacuuacugacagcca

SEQ ID NO: 10269 - RNA, 25 nt, Artificial Sequence
  Synthetic Oligonucleotide
acuauagcauacuuacugacagcca

SEQ ID NO: 10270 - RNA, 25 nt, Artificial Sequence
  Synthetic Oligonucleotide
cucuagcauacuuacugacagucag

SEQ ID NO: 10271 - RNA, 25 nt, Artificial Sequence
  Synthetic Oligonucleotide
cucuagcauacuuacugauagccag

SEQ ID NO: 10272 - RNA, 25 nt, Artificial Sequence
  Synthetic Oligonucleotide
cuuuagcauacuuacugacagccag

SEQ ID NO: 10273 - RNA, 25 nt, Artificial Sequence
  Synthetic Oligonucleotide
cucuagcaugcuuacugacagccag

SEQ ID NO: 10274 - RNA, 25 nt, Artificial Sequence
  Synthetic Oligonucleotide
cuccagcauacuuacugacagccag

SEQ ID NO: 10275 - RNA, 25 nt, Artificial Sequence
  Synthetic Oligonucleotide
cucuagcauacuuaccgacagccag

SEQ ID NO: 10276 - RNA, 25 nt, Artificial Sequence
  Synthetic Oligonucleotide
cucuagcagacuuacugacagccag

SEQ ID NO: 10277 - RNA, 25 nt, Artificial Sequence
  Synthetic Oligonucleotide
cucuaacauacuuacugacagccag

SEQ ID NO: 10278 - RNA, 25 nt, Artificial Sequence
  Synthetic Oligonucleotide
cuauagcauacuuacugacagccag

SEQ ID NO: 10279 - RNA, 25 nt, Artificial Sequence
  Synthetic Oligonucleotide
ucuagcauacuuacugacagucaga

SEQ ID NO: 10280 - RNA, 25 nt, Artificial Sequence
  Synthetic Oligonucleotide
ucuagcauacuuacugauagccaga

SEQ ID NO: 10281 - RNA, 25 nt, Artificial Sequence
  Synthetic Oligonucleotide
uuuagcauacuuacugacagccaga

SEQ ID NO: 10282 - RNA, 25 nt, Artificial Sequence
  Synthetic Oligonucleotide
ucuagcaugcuuacugacagccaga

SEQ ID NO: 10283 - RNA, 25 nt, Artificial Sequence
  Synthetic Oligonucleotide
uccagcauacuuacugacagccaga

SEQ ID NO: 10284 - RNA, 25 nt, Artificial Sequence
  Synthetic Oligonucleotide
ucuagcauacuuaccgacagccaga

SEQ ID NO: 10285 - RNA, 25 nt, Artificial Sequence
  Synthetic Oligonucleotide
ucuagcagacuuacugacagccaga

SEQ ID NO: 10286 - RNA, 25 nt, Artificial Sequence
  Synthetic Oligonucleotide
ucuaacauacuuacugacagccaga

SEQ ID NO: 10287 - RNA, 25 nt, Artificial Sequence
  Synthetic Oligonucleotide
uauagcauacuuacugacagccaga

SEQ ID NO: 10288 - RNA, 25 nt, Artificial Sequence
  Synthetic Oligonucleotide
cuagcauacuuacugacagucagac

SEQ ID NO: 10289 - RNA, 25 nt, Artificial Sequence
  Synthetic Oligonucleotide
cuagcauacuuacugauagccagac

SEQ ID NO: 10290 - RNA, 25 nt, Artificial Sequence
  Synthetic Oligonucleotide
uuagcauacuuacugacagccagac

SEQ ID NO: 10291 - RNA, 25 nt, Artificial Sequence
  Synthetic Oligonucleotide
cuagcaugcuuacugacagccagac

SEQ ID NO: 10292 - RNA, 25 nt, Artificial Sequence
  Synthetic Oligonucleotide
ccagcauacuuacugacagccagac

SEQ ID NO: 10293 - RNA, 25 nt, Artificial Sequence
  Synthetic Oligonucleotide
cuagcauacuuaccgacagccagac

SEQ ID NO: 10294 - RNA, 25 nt, Artificial Sequence
  Synthetic Oligonucleotide
cuagcagacuuacugacagccagac

SEQ ID NO: 10295 - RNA, 25 nt, Artificial Sequence
  Synthetic Oligonucleotide
cuaacauacuuacugacagccagac

SEQ ID NO: 10296 - RNA, 25 nt, Artificial Sequence
  Synthetic Oligonucleotide
auagcauacuuacugacagccagac

SEQ ID NO: 10297 - RNA, 25 nt, Artificial Sequence
  Synthetic Oligonucleotide
cagacagcgaccaaaagaauucgaa

SEQ ID NO: 10298 - RNA, 25 nt, Artificial Sequence
  Synthetic Oligonucleotide
cagacagcgaccaaaagaauuccga

SEQ ID NO: 10299 - RNA, 25 nt, Artificial Sequence
  Synthetic Oligonucleotide
cagacagcgaccaaaagaagucgga

SEQ ID NO: 10300 - RNA, 25 nt, Artificial Sequence
  Synthetic Oligonucleotide
cagacagcgaccaaaaggauucgga

SEQ ID NO: 10301 - RNA, 25 nt, Artificial Sequence
  Synthetic Oligonucleotide
cagacagcgaccaaaagaguucgga

SEQ ID NO: 10302 - RNA, 25 nt, Artificial Sequence
  Synthetic Oligonucleotide
cagacagcgaccaaaggaauucgga

SEQ ID NO: 10303 - RNA, 25 nt, Artificial Sequence
  Synthetic Oligonucleotide
cagacagcgaccaaaagauuucgga

SEQ ID NO: 10304 - RNA, 25 nt, Artificial Sequence
  Synthetic Oligonucleotide
cagacagcgaccaaaaggauucgaa

SEQ ID NO: 10305 - RNA, 25 nt, Artificial Sequence
  Synthetic Oligonucleotide
cagacgacgaucaaaagaauucgga

SEQ ID NO: 10306 - RNA, 25 nt, Artificial Sequence
  Synthetic Oligonucleotide
gacagcgaccaaaagaauucgaaug

SEQ ID NO: 10307 - RNA, 25 nt, Artificial Sequence
  Synthetic Oligonucleotide
gacagcgaccaaaagaauuccgaug

SEQ ID NO: 10308 - RNA, 25 nt, Artificial Sequence
  Synthetic Oligonucleotide
gacagcgaccaaaaggauucggaug

SEQ ID NO: 10309 - RNA, 25 nt, Artificial Sequence
  Synthetic Oligonucleotide
gacagcgaccaaaagaguucggaug

SEQ ID NO: 10310 - RNA, 25 nt, Artificial Sequence
  Synthetic Oligonucleotide
gacagcgaccaaaggaauucggaug

SEQ ID NO: 10311 - RNA, 25 nt, Artificial Sequence
  Synthetic Oligonucleotide
gacagcgaccaaaagauuucggaug

SEQ ID NO: 10312 - RNA, 25 nt, Artificial Sequence
  Synthetic Oligonucleotide
gacagcgaccaaaaggauucgaaug

SEQ ID NO: 10313 - RNA, 25 nt, Artificial Sequence
  Synthetic Oligonucleotide
gacagcgaccaaaagaagucggacu

SEQ ID NO: 10314 - RNA, 25 nt, Artificial Sequence
  Synthetic Oligonucleotide
gacgacgaucaaaagaauucggaug

SEQ ID NO: 10315 - RNA, 25 nt, Artificial Sequence
  Synthetic Oligonucleotide
agacagcgaccaaaagaauucgaau

SEQ ID NO: 10316 - RNA, 25 nt, Artificial Sequence
  Synthetic Oligonucleotide
agacagcgaccaaaagaauuccgau

SEQ ID NO: 10317 - RNA, 25 nt, Artificial Sequence
  Synthetic Oligonucleotide
agacagcgaccaaaaggauucggau

SEQ ID NO: 10318 - RNA, 25 nt, Artificial Sequence
  Synthetic Oligonucleotide
agacagcgaccaaaagaguucggau

SEQ ID NO: 10319 - RNA, 25 nt, Artificial Sequence
  Synthetic Oligonucleotide
agacagcgaccaaaggaauucggau

SEQ ID NO: 10320 - RNA, 25 nt, Artificial Sequence
  Synthetic Oligonucleotide
agacagcgaccaaaagauuucggau

SEQ ID NO: 10321 - RNA, 25 nt, Artificial Sequence
  Synthetic Oligonucleotide
agacagcgaccaaaaggauucgaau

SEQ ID NO: 10322 - RNA, 25 nt, Artificial Sequence
  Synthetic Oligonucleotide
agacagcgaccaaaagaagucggac

SEQ ID NO: 10323 - RNA, 25 nt, Artificial Sequence
  Synthetic Oligonucleotide
agacgacgaucaaaagaauucggau

SEQ ID NO: 10324 - RNA, 25 nt, Artificial Sequence
  Synthetic Oligonucleotide
ccagacagcgaccaaaagaguucgg

SEQ ID NO: 10325 - RNA, 25 nt, Artificial Sequence
  Synthetic Oligonucleotide
ccagacagcgaccaaaagaauucga

SEQ ID NO: 10326 - RNA, 25 nt, Artificial Sequence
  Synthetic Oligonucleotide
ccagacagcgaccaaaagaagucgg

SEQ ID NO: 10327 - RNA, 25 nt, Artificial Sequence
  Synthetic Oligonucleotide
ccagacagcgaccaaaagauuucgg

SEQ ID NO: 10328 - RNA, 25 nt, Artificial Sequence
  Synthetic Oligonucleotide
ccagacagcgaccaaaaggauucgg

SEQ ID NO: 10329 - RNA, 25 nt, Artificial Sequence
  Synthetic Oligonucleotide
ccagacagcgaccaaaggaauucgg

SEQ ID NO: 10330 - RNA, 25 nt, Artificial Sequence
  Synthetic Oligonucleotide
ucagacagcgaccaaaagaauucgg

SEQ ID NO: 10331 - RNA, 25 nt, Artificial Sequence
  Synthetic Oligonucleotide
ucagacagcgaccaaaagaauucga

SEQ ID NO: 10332 - RNA, 25 nt, Artificial Sequence
  Synthetic Oligonucleotide
ccagacagcgaccaaaaggauucga

SEQ ID NO: 10333 - RNA, 25 nt, Artificial Sequence
  Synthetic Oligonucleotide
ucagacagcgaccaaaagaauuccg

SEQ ID NO: 10334 - RNA, 25 nt, Artificial Sequence
  Synthetic Oligonucleotide
ccagacgacgaucaaaagaauucgg

SEQ ID NO: 10335 - RNA, 25 nt, Artificial Sequence
  Synthetic Oligonucleotide
acagcgaccaaaagaauucgaaugg

SEQ ID NO: 10336 - RNA, 25 nt, Artificial Sequence
  Synthetic Oligonucleotide
acagcgaccaaaagaauuccgaugg

SEQ ID NO: 10337 - RNA, 25 nt, Artificial Sequence
  Synthetic Oligonucleotide
acagcgaccaaaaggauucggaugg

SEQ ID NO: 10338 - RNA, 25 nt, Artificial Sequence
  Synthetic Oligonucleotide
acagcgaccaaaagaguucggaugg

SEQ ID NO: 10339 - RNA, 25 nt, Artificial Sequence
  Synthetic Oligonucleotide
acagcgaccaaaggaauucggaugg

SEQ ID NO: 10340 - RNA, 25 nt, Artificial Sequence
  Synthetic Oligonucleotide
acagcgaccaaaagauuucggaugg

SEQ ID NO: 10341 - RNA, 25 nt, Artificial Sequence
  Synthetic Oligonucleotide
acagcgaccaaaaggauucgaaugg

SEQ ID NO: 10342 - RNA, 25 nt, Artificial Sequence
  Synthetic Oligonucleotide
acagcgaccaaaagaagucggacug

SEQ ID NO: 10343 - RNA, 25 nt, Artificial Sequence
  Synthetic Oligonucleotide
acgacgaucaaaagaauucggaugg

SEQ ID NO: 10344 - RNA, 25 nt, Artificial Sequence
  Synthetic Oligonucleotide
gcgaccaaaaggauucggauggcca

SEQ ID NO: 10345 - RNA, 25 nt, Artificial Sequence
  Synthetic Oligonucleotide
gcgaccaaaagaguucggauggcca

SEQ ID NO: 10346 - RNA, 25 nt, Artificial Sequence
  Synthetic Oligonucleotide
gcgaccaaaggaauucggauggcca

SEQ ID NO: 10347 - RNA, 25 nt, Artificial Sequence
  Synthetic Oligonucleotide
gcgaccaaaagaauucgaauggcca

SEQ ID NO: 10348 - RNA, 25 nt, Artificial Sequence
  Synthetic Oligonucleotide
gcgaccaaaagaauuccgauggcca

SEQ ID NO: 10349 - RNA, 25 nt, Artificial Sequence
  Synthetic Oligonucleotide
gcgaccaaaagauuucggauggcca

SEQ ID NO: 10350 - RNA, 25 nt, Artificial Sequence
  Synthetic Oligonucleotide
gcgaccaaaagaauucgaauggccu

SEQ ID NO: 10351 - RNA, 25 nt, Artificial Sequence
  Synthetic Oligonucleotide
gcgaccaaaagaagucggacugcca

SEQ ID NO: 10352 - RNA, 25 nt, Artificial Sequence
  Synthetic Oligonucleotide
gcgaccaaaaggauucgaauggcca

SEQ ID NO: 10353 - RNA, 25 nt, Artificial Sequence
  Synthetic Oligonucleotide
acgaucaaaagaauucggauggcca

SEQ ID NO: 10354 - RNA, 25 nt, Artificial Sequence
  Synthetic Oligonucleotide
cagcgaccaaaagaauucgaauggc

SEQ ID NO: 10355 - RNA, 25 nt, Artificial Sequence
  Synthetic Oligonucleotide
cagcgaccaaaaggauucggauggc

SEQ ID NO: 10356 - RNA, 25 nt, Artificial Sequence
  Synthetic Oligonucleotide
cagcgaccaaaagaguucggauggc

SEQ ID NO: 10357 - RNA, 25 nt, Artificial Sequence
  Synthetic Oligonucleotide
cagcgaccaaaggaauucggauggc

SEQ ID NO: 10358 - RNA, 25 nt, Artificial Sequence
  Synthetic Oligonucleotide
cagcgaccaaaagaauuccgauggc

SEQ ID NO: 10359 - RNA, 25 nt, Artificial Sequence
  Synthetic Oligonucleotide
cagcgaccaaaagauuucggauggc

SEQ ID NO: 10360 - RNA, 25 nt, Artificial Sequence
  Synthetic Oligonucleotide
cagcgaccaaaaggauucgaauggc

SEQ ID NO: 10361 - RNA, 25 nt, Artificial Sequence
  Synthetic Oligonucleotide
cagcgaccaaaagaagucggacugc

SEQ ID NO: 10362 - RNA, 25 nt, Artificial Sequence
  Synthetic Oligonucleotide
cgacgaucaaaagaauucggauggc

SEQ ID NO: 10363 - RNA, 25 nt, Artificial Sequence
  Synthetic Oligonucleotide
cgaccaaaaggauucggauggccau

SEQ ID NO: 10364 - RNA, 25 nt, Artificial Sequence
  Synthetic Oligonucleotide
cgaccaaaagaguucggauggccau

SEQ ID NO: 10365 - RNA, 25 nt, Artificial Sequence
  Synthetic Oligonucleotide
cgaccaaaggaauucggauggccau

SEQ ID NO: 10366 - RNA, 25 nt, Artificial Sequence
  Synthetic Oligonucleotide
cgaccaaaagaauucgaauggccau

SEQ ID NO: 10367 - RNA, 25 nt, Artificial Sequence
  Synthetic Oligonucleotide
cgaccaaaagaauuccgauggccau

SEQ ID NO: 10368 - RNA, 25 nt, Artificial Sequence
  Synthetic Oligonucleotide
cgaccaaaagauuucggauggccau

SEQ ID NO: 10369 - RNA, 25 nt, Artificial Sequence
  Synthetic Oligonucleotide
cgaucaaaagaauucggauggccac

SEQ ID NO: 10370 - RNA, 25 nt, Artificial Sequence
  Synthetic Oligonucleotide
cgaccaaaagaauucgaauggccuu

SEQ ID NO: 10371 - RNA, 25 nt, Artificial Sequence
  Synthetic Oligonucleotide
cgaccaaaaggauucgaauggccau

SEQ ID NO: 10372 - RNA, 25 nt, Artificial Sequence
  Synthetic Oligonucleotide
cgaccaaaagaagucggacugccau

SEQ ID NO: 10373 - RNA, 25 nt, Artificial Sequence
  Synthetic Oligonucleotide
agcgaccaaaaggauucggauggcc

SEQ ID NO: 10374 - RNA, 25 nt, Artificial Sequence
  Synthetic Oligonucleotide
agcgaccaaaagaguucggauggcc

SEQ ID NO: 10375 - RNA, 25 nt, Artificial Sequence
  Synthetic Oligonucleotide
agcgaccaaaggaauucggauggcc

SEQ ID NO: 10376 - RNA, 25 nt, Artificial Sequence
  Synthetic Oligonucleotide
agcgaccaaaagaauucgaauggcc

SEQ ID NO: 10377 - RNA, 25 nt, Artificial Sequence
  Synthetic Oligonucleotide
agcgaccaaaagaauuccgauggcc

SEQ ID NO: 10378 - RNA, 25 nt, Artificial Sequence
  Synthetic Oligonucleotide
agcgaccaaaagauuucggauggcc

SEQ ID NO: 10379 - RNA, 25 nt, Artificial Sequence
  Synthetic Oligonucleotide
agcgaccaaaagaagucggacugcc

SEQ ID NO: 10380 - RNA, 25 nt, Artificial Sequence
  Synthetic Oligonucleotide
agcgaccaaaaggauucgaauggcc

SEQ ID NO: 10381 - RNA, 25 nt, Artificial Sequence
  Synthetic Oligonucleotide
gacgaucaaaagaauucggauggcc

SEQ ID NO: 10382 - RNA, 25 nt, Artificial Sequence
  Synthetic Oligonucleotide
gacucuagcauacuuacugacaguc

SEQ ID NO: 10383 - RNA, 25 nt, Artificial Sequence
  Synthetic Oligonucleotide
gacucuagcauacuuacugauagcc

SEQ ID NO: 10384 - RNA, 25 nt, Artificial Sequence
  Synthetic Oligonucleotide
gacuuuagcauacuuacugacagcc

SEQ ID NO: 10385 - RNA, 25 nt, Artificial Sequence
  Synthetic Oligonucleotide
gacucuagcaugcuuacugacagcc

SEQ ID NO: 10386 - RNA, 25 nt, Artificial Sequence
  Synthetic Oligonucleotide
gacuccagcauacuuacugacagcc

SEQ ID NO: 10387 - RNA, 25 nt, Artificial Sequence
  Synthetic Oligonucleotide
aacucuagcauacuuacugacagcc

SEQ ID NO: 10388 - RNA, 25 nt, Artificial Sequence
  Synthetic Oligonucleotide
gacucuagcauacuuaccgacagcc

SEQ ID NO: 10389 - RNA, 25 nt, Artificial Sequence
  Synthetic Oligonucleotide
gacucuagcagacuuacugacagcc

SEQ ID NO: 10390 - RNA, 25 nt, Artificial Sequence
  Synthetic Oligonucleotide
gacucuaacauacuuacugacagcc

SEQ ID NO: 10391 - RNA, 25 nt, Artificial Sequence
  Synthetic Oligonucleotide
gacuauagcauacuuacugacagcc

SEQ ID NO: 10392 - RNA, 25 nt, Artificial Sequence
  Synthetic Oligonucleotide
gaccaaaagaauucggauggccauu

SEQ ID NO: 10393 - RNA, 25 nt, Artificial Sequence
  Synthetic Oligonucleotide
gaccaaaaggauucggauggccauc

SEQ ID NO: 10394 - RNA, 25 nt, Artificial Sequence
  Synthetic Oligonucleotide
gaccaaaagaguucggauggccauc

SEQ ID NO: 10395 - RNA, 25 nt, Artificial Sequence
  Synthetic Oligonucleotide
gaccaaaggaauucggauggccauc

SEQ ID NO: 10396 - RNA, 25 nt, Artificial Sequence
  Synthetic Oligonucleotide
gaccaaaagaauucgaauggccauc

SEQ ID NO: 10397 - RNA, 25 nt, Artificial Sequence
  Synthetic Oligonucleotide
gaccaaaagaauuccgauggccauc

SEQ ID NO: 10398 - RNA, 25 nt, Artificial Sequence
  Synthetic Oligonucleotide
gaccaaaagauuucggauggccauc

SEQ ID NO: 10399 - RNA, 25 nt, Artificial Sequence
  Synthetic Oligonucleotide
gaucaaaagaauucggauggccacc

SEQ ID NO: 10400 - RNA, 25 nt, Artificial Sequence
  Synthetic Oligonucleotide
gaccaaaagaauucgaauggccuuc

SEQ ID NO: 10401 - RNA, 25 nt, Artificial Sequence
  Synthetic Oligonucleotide
gaccaaaaggauucgaauggccauc

SEQ ID NO: 10402 - RNA, 25 nt, Artificial Sequence
  Synthetic Oligonucleotide
gaccaaaagaagucggacugccauc

SEQ ID NO: 10403 - RNA, 25 nt, Artificial Sequence
  Synthetic Oligonucleotide
ugaaauggaugauggcaaugagaua

SEQ ID NO: 10404 - RNA, 25 nt, Artificial Sequence
  Synthetic Oligonucleotide
ugaaauggaugauggcgaugaaaua

SEQ ID NO: 10405 - RNA, 25 nt, Artificial Sequence
  Synthetic Oligonucleotide
ugaaguggaugauggcaaugaaaua

SEQ ID NO: 10406 - RNA, 25 nt, Artificial Sequence
  Synthetic Oligonucleotide
ugaaauggaugauggccaugaaaua

SEQ ID NO: 10407 - RNA, 25 nt, Artificial Sequence
  Synthetic Oligonucleotide
ugaaauggaugauggcuaugaaaua

SEQ ID NO: 10408 - RNA, 25 nt, Artificial Sequence
  Synthetic Oligonucleotide
accaaaagaauucggauggccauua

SEQ ID NO: 10409 - RNA, 25 nt, Artificial Sequence
  Synthetic Oligonucleotide
accaaaaggauucggauggccauca

SEQ ID NO: 10410 - RNA, 25 nt, Artificial Sequence
  Synthetic Oligonucleotide
accaaaagaguucggauggccauca

SEQ ID NO: 10411 - RNA, 25 nt, Artificial Sequence
  Synthetic Oligonucleotide
accaaaggaauucggauggccauca

SEQ ID NO: 10412 - RNA, 25 nt, Artificial Sequence
  Synthetic Oligonucleotide
accaaaagaauucgaauggccauca

SEQ ID NO: 10413 - RNA, 25 nt, Artificial Sequence
  Synthetic Oligonucleotide
accaaaagaauuccgauggccauca

SEQ ID NO: 10414 - RNA, 25 nt, Artificial Sequence
  Synthetic Oligonucleotide
accaaaagauuucggauggccauca

SEQ ID NO: 10415 - RNA, 25 nt, Artificial Sequence
  Synthetic Oligonucleotide
aucaaaagaauucggauggccacca

SEQ ID NO: 10416 - RNA, 25 nt, Artificial Sequence
  Synthetic Oligonucleotide
accaaaagaauucgaauggccuuca

SEQ ID NO: 10417 - RNA, 25 nt, Artificial Sequence
  Synthetic Oligonucleotide
accaaaaggauucgaauggccauca

SEQ ID NO: 10418 - RNA, 25 nt, Artificial Sequence
  Synthetic Oligonucleotide
accaaaagaagucggacugccauca

SEQ ID NO: 10419 - RNA, 25 nt, Artificial Sequence
  Synthetic Oligonucleotide
augaaauggaugauggcaaugagau

SEQ ID NO: 10420 - RNA, 25 nt, Artificial Sequence
  Synthetic Oligonucleotide
augaaauggaugauggcgaugaaau

SEQ ID NO: 10421 - RNA, 25 nt, Artificial Sequence
  Synthetic Oligonucleotide
augaaguggaugauggcaaugaaau

SEQ ID NO: 10422 - RNA, 25 nt, Artificial Sequence
  Synthetic Oligonucleotide
gugaaauggaugauggcaaugaaau

SEQ ID NO: 10423 - RNA, 25 nt, Artificial Sequence
  Synthetic Oligonucleotide
augaaauggaugauggccaugaaau

SEQ ID NO: 10424 - RNA, 25 nt, Artificial Sequence
  Synthetic Oligonucleotide
augaaauggaugauggcuaugaaau

SEQ ID NO: 10425 - RNA, 25 nt, Artificial Sequence
  Synthetic Oligonucleotide
ccaaaagaauucggauggccauuaa

SEQ ID NO: 10426 - RNA, 25 nt, Artificial Sequence
  Synthetic Oligonucleotide
ccaaaagaauucggauggccaucau

SEQ ID NO: 10427 - RNA, 25 nt, Artificial Sequence
  Synthetic Oligonucleotide
ccaaaaggauucggauggccaucaa

SEQ ID NO: 10428 - RNA, 25 nt, Artificial Sequence
  Synthetic Oligonucleotide
ccaaaagaguucggauggccaucaa

SEQ ID NO: 10429 - RNA, 25 nt, Artificial Sequence
  Synthetic Oligonucleotide
ccaaaggaauucggauggccaucaa

SEQ ID NO: 10430 - RNA, 25 nt, Artificial Sequence
  Synthetic Oligonucleotide
ccaaaagaauucgaauggccaucaa

SEQ ID NO: 10431 - RNA, 25 nt, Artificial Sequence
  Synthetic Oligonucleotide
ccaaaagaauuccgauggccaucaa

SEQ ID NO: 10432 - RNA, 25 nt, Artificial Sequence
  Synthetic Oligonucleotide
ccaaaagauuucggauggccaucaa

SEQ ID NO: 10433 - RNA, 25 nt, Artificial Sequence
  Synthetic Oligonucleotide
ucaaaagaauucggauggccaccaa

SEQ ID NO: 10434 - RNA, 25 nt, Artificial Sequence
  Synthetic Oligonucleotide
ccaaaagaauucgaauggccuucaa

SEQ ID NO: 10435 - RNA, 25 nt, Artificial Sequence
  Synthetic Oligonucleotide
ccaaaaggauucgaauggccaucaa

SEQ ID NO: 10436 - RNA, 25 nt, Artificial Sequence
  Synthetic Oligonucleotide
ccaaaagaagucggacugccaucaa

SEQ ID NO: 10437 - RNA, 25 nt, Artificial Sequence
  Synthetic Oligonucleotide
caaaagaauucggauggccauuaau

SEQ ID NO: 10438 - RNA, 25 nt, Artificial Sequence
  Synthetic Oligonucleotide
caaaagaauucggauggccaucauu

SEQ ID NO: 10439 - RNA, 25 nt, Artificial Sequence
  Synthetic Oligonucleotide
caaaagaauucggauggccaucaac

SEQ ID NO: 10440 - RNA, 25 nt, Artificial Sequence
  Synthetic Oligonucleotide
caaaagaauucggauggccaucaag

SEQ ID NO: 10441 - RNA, 25 nt, Artificial Sequence
  Synthetic Oligonucleotide
caaaagaauucggauggccaccaau

SEQ ID NO: 10442 - RNA, 25 nt, Artificial Sequence
  Synthetic Oligonucleotide
caaaaggauucggauggccaucaau

SEQ ID NO: 10443 - RNA, 25 nt, Artificial Sequence
  Synthetic Oligonucleotide
caaaagaguucggauggccaucaau

SEQ ID NO: 10444 - RNA, 25 nt, Artificial Sequence
  Synthetic Oligonucleotide
caaaggaauucggauggccaucaau

SEQ ID NO: 10445 - RNA, 25 nt, Artificial Sequence
  Synthetic Oligonucleotide
caaaagaauucgaauggccaucaau

SEQ ID NO: 10446 - RNA, 25 nt, Artificial Sequence
  Synthetic Oligonucleotide
caaaagaauuccgauggccaucaau

SEQ ID NO: 10447 - RNA, 25 nt, Artificial Sequence
  Synthetic Oligonucleotide
caaaagauuucggauggccaucaau

SEQ ID NO: 10448 - RNA, 25 nt, Artificial Sequence
  Synthetic Oligonucleotide
caaaagaauucgaauggccuucaau

SEQ ID NO: 10449 - RNA, 25 nt, Artificial Sequence
  Synthetic Oligonucleotide
caaaaggauucgaauggccaucaau

SEQ ID NO: 10450 - RNA, 25 nt, Artificial Sequence
  Synthetic Oligonucleotide
caaaagaagucggacugccaucaau

SEQ ID NO: 10451 - RNA, 25 nt, Artificial Sequence
  Synthetic Oligonucleotide
aaaagaauucggauggccauuaauu

SEQ ID NO: 10452 - RNA, 25 nt, Artificial Sequence
  Synthetic Oligonucleotide
aaaagaauucggauggccaucauuu

SEQ ID NO: 10453 - RNA, 25 nt, Artificial Sequence
  Synthetic Oligonucleotide
aaaagaauucggauggccaucaacu

SEQ ID NO: 10454 - RNA, 25 nt, Artificial Sequence
  Synthetic Oligonucleotide
aaaagaauucggauggccaucaaua

SEQ ID NO: 10455 - RNA, 25 nt, Artificial Sequence
  Synthetic Oligonucleotide
aaaagaauucggauggccaucaauc

SEQ ID NO: 10456 - RNA, 25 nt, Artificial Sequence
  Synthetic Oligonucleotide
aaaagaauucggauggccaucaagu

SEQ ID NO: 10457 - RNA, 25 nt, Artificial Sequence
  Synthetic Oligonucleotide
aaaagaauucggauggccaccaaug

SEQ ID NO: 10458 - RNA, 25 nt, Artificial Sequence
  Synthetic Oligonucleotide
aaaaggauucggauggccaucaauu

SEQ ID NO: 10459 - RNA, 25 nt, Artificial Sequence
  Synthetic Oligonucleotide
aaaagaguucggauggccaucaauu

SEQ ID NO: 10460 - RNA, 25 nt, Artificial Sequence
  Synthetic Oligonucleotide
aaaggaauucggauggccaucaauu

SEQ ID NO: 10461 - RNA, 25 nt, Artificial Sequence
  Synthetic Oligonucleotide
aaaagaauucgaauggccaucaauu

SEQ ID NO: 10462 - RNA, 25 nt, Artificial Sequence
  Synthetic Oligonucleotide
aaaagaauuccgauggccaucaauu

SEQ ID NO: 10463 - RNA, 25 nt, Artificial Sequence
  Synthetic Oligonucleotide
aaaagauuucggauggccaucaauu

SEQ ID NO: 10464 - RNA, 25 nt, Artificial Sequence
  Synthetic Oligonucleotide
aaaaggauucgaauggccaucaauu

SEQ ID NO: 10465 - RNA, 25 nt, Artificial Sequence
  Synthetic Oligonucleotide
aaaagaauucgaauggccuucaauu

SEQ ID NO: 10466 - RNA, 25 nt, Artificial Sequence
  Synthetic Oligonucleotide
aaaagaagucggacugccaucaauu

SEQ ID NO: 10467 - RNA, 25 nt, Artificial Sequence
  Synthetic Oligonucleotide
aaagaauucggauggccauuaauua

SEQ ID NO: 10468 - RNA, 25 nt, Artificial Sequence
  Synthetic Oligonucleotide
aaagaauucggauggccaucauuua

SEQ ID NO: 10469 - RNA, 25 nt, Artificial Sequence
  Synthetic Oligonucleotide
aaagaauucggauggccaucaacua

SEQ ID NO: 10470 - RNA, 25 nt, Artificial Sequence
  Synthetic Oligonucleotide
aaagaauucggauggccaucaauuu

SEQ ID NO: 10471 - RNA, 25 nt, Artificial Sequence
  Synthetic Oligonucleotide
aaagaauucggauggccaucaauca

SEQ ID NO: 10472 - RNA, 25 nt, Artificial Sequence
  Synthetic Oligonucleotide
aaagaauucggauggccaucaagua

SEQ ID NO: 10473 - RNA, 25 nt, Artificial Sequence
  Synthetic Oligonucleotide
aaagaauucggauggccaucaauag

SEQ ID NO: 10474 - RNA, 25 nt, Artificial Sequence
  Synthetic Oligonucleotide
aaaggauucggauggccaucaauua

SEQ ID NO: 10475 - RNA, 25 nt, Artificial Sequence
  Synthetic Oligonucleotide
aaagaguucggauggccaucaauua

SEQ ID NO: 10476 - RNA, 25 nt, Artificial Sequence
  Synthetic Oligonucleotide
aaggaauucggauggccaucaauua

SEQ ID NO: 10477 - RNA, 25 nt, Artificial Sequence
  Synthetic Oligonucleotide
aaagaauucgaauggccaucaauua

SEQ ID NO: 10478 - RNA, 25 nt, Artificial Sequence
  Synthetic Oligonucleotide
aaagaauuccgauggccaucaauua

SEQ ID NO: 10479 - RNA, 25 nt, Artificial Sequence
  Synthetic Oligonucleotide
aaagauuucggauggccaucaauua

SEQ ID NO: 10480 - RNA, 25 nt, Artificial Sequence
  Synthetic Oligonucleotide
aaagaauucggauggccaccaauga

SEQ ID NO: 10481 - RNA, 25 nt, Artificial Sequence
  Synthetic Oligonucleotide
aaaggauucgaauggccaucaauua

SEQ ID NO: 10482 - RNA, 25 nt, Artificial Sequence
  Synthetic Oligonucleotide
aaagaauucgaauggccuucaauua

SEQ ID NO: 10483 - RNA, 25 nt, Artificial Sequence
  Synthetic Oligonucleotide
aaagaagucggacugccaucaauua

SEQ ID NO: 10484 - RNA, 25 nt, Artificial Sequence
  Synthetic Oligonucleotide
gggacucuagcauacuuacugauag

SEQ ID NO: 10485 - RNA, 25 nt, Artificial Sequence
  Synthetic Oligonucleotide
gggacucuagcauacuuaccgacag

SEQ ID NO: 10486 - RNA, 25 nt, Artificial Sequence
  Synthetic Oligonucleotide
gggacuuuagcauacuuacugacag

SEQ ID NO: 10487 - RNA, 25 nt, Artificial Sequence
  Synthetic Oligonucleotide
gggacucuagcaugcuuacugacag

SEQ ID NO: 10488 - RNA, 25 nt, Artificial Sequence
  Synthetic Oligonucleotide
gagacucuagcauacuuacugacag

SEQ ID NO: 10489 - RNA, 25 nt, Artificial Sequence
  Synthetic Oligonucleotide
gggacuccagcauacuuacugacag

SEQ ID NO: 10490 - RNA, 25 nt, Artificial Sequence
  Synthetic Oligonucleotide
ggaacucuagcauacuuacugacag

SEQ ID NO: 10491 - RNA, 25 nt, Artificial Sequence
  Synthetic Oligonucleotide
gggacucuagcagacuuacugacag

SEQ ID NO: 10492 - RNA, 25 nt, Artificial Sequence
  Synthetic Oligonucleotide
gggacucuaacauacuuacugacag

SEQ ID NO: 10493 - RNA, 25 nt, Artificial Sequence
  Synthetic Oligonucleotide
gggacuauagcauacuuacugacag

SEQ ID NO: 10494 - RNA, 25 nt, Artificial Sequence
  Synthetic Oligonucleotide
gagacucuagcauacuuacugauag

SEQ ID NO: 10495 - RNA, 25 nt, Artificial Sequence
  Synthetic Oligonucleotide
gaaacucuagcauacuuacugacag

SEQ ID NO: 10496 - RNA, 25 nt, Artificial Sequence
  Synthetic Oligonucleotide
aaacgggacucuagcauacuuaccg

SEQ ID NO: 10497 - RNA, 25 nt, Artificial Sequence
  Synthetic Oligonucleotide
aaacgggacuuuagcauacuuacug

SEQ ID NO: 10498 - RNA, 25 nt, Artificial Sequence
  Synthetic Oligonucleotide
aaacgggacucuagcaugcuuacug

SEQ ID NO: 10499 - RNA, 25 nt, Artificial Sequence
  Synthetic Oligonucleotide
aaaugggacucuagcauacuuacug

SEQ ID NO: 10500 - RNA, 25 nt, Artificial Sequence
  Synthetic Oligonucleotide
aaacgagacucuagcauacuuacug

SEQ ID NO: 10501 - RNA, 25 nt, Artificial Sequence
  Synthetic Oligonucleotide
aaacgggacuccagcauacuuacug

SEQ ID NO: 10502 - RNA, 25 nt, Artificial Sequence
  Synthetic Oligonucleotide
aaacggaacucuagcauacuuacug

SEQ ID NO: 10503 - RNA, 25 nt, Artificial Sequence
  Synthetic Oligonucleotide
aaaagggacucuagcauacuuacug

SEQ ID NO: 10504 - RNA, 25 nt, Artificial Sequence
  Synthetic Oligonucleotide
aaacgggacucuagcagacuuacug

SEQ ID NO: 10505 - RNA, 25 nt, Artificial Sequence
  Synthetic Oligonucleotide
aaacgggacucuaacauacuuacug

SEQ ID NO: 10506 - RNA, 25 nt, Artificial Sequence
  Synthetic Oligonucleotide
aaacgggacuauagcauacuuacug

SEQ ID NO: 10507 - RNA, 25 nt, Artificial Sequence
  Synthetic Oligonucleotide
aaacgaaacucuagcauacuuacug

SEQ ID NO: 10508 - RNA, 25 nt, Artificial Sequence
  Synthetic Oligonucleotide
aaaagagacucuagcauacuuacug

SEQ ID NO: 10509 - RNA, 25 nt, Artificial Sequence
  Synthetic Oligonucleotide
aacgggacucuagcauacuuaccga

SEQ ID NO: 10510 - RNA, 25 nt, Artificial Sequence
  Synthetic Oligonucleotide
aacgggacuuuagcauacuuacuga

SEQ ID NO: 10511 - RNA, 25 nt, Artificial Sequence
  Synthetic Oligonucleotide
aacgggacucuagcaugcuuacuga

SEQ ID NO: 10512 - RNA, 25 nt, Artificial Sequence
  Synthetic Oligonucleotide
aaugggacucuagcauacuuacuga

SEQ ID NO: 10513 - RNA, 25 nt, Artificial Sequence
  Synthetic Oligonucleotide
aacgagacucuagcauacuuacuga

SEQ ID NO: 10514 - RNA, 25 nt, Artificial Sequence
  Synthetic Oligonucleotide
aacgggacuccagcauacuuacuga

SEQ ID NO: 10515 - RNA, 25 nt, Artificial Sequence
  Synthetic Oligonucleotide
aacggaacucuagcauacuuacuga

SEQ ID NO: 10516 - RNA, 25 nt, Artificial Sequence
  Synthetic Oligonucleotide
aaagggacucuagcauacuuacuga

SEQ ID NO: 10517 - RNA, 25 nt, Artificial Sequence
  Synthetic Oligonucleotide
aacgggacucuagcagacuuacuga

SEQ ID NO: 10518 - RNA, 25 nt, Artificial Sequence
  Synthetic Oligonucleotide
aacgggacucuaacauacuuacuga

SEQ ID NO: 10519 - RNA, 25 nt, Artificial Sequence
  Synthetic Oligonucleotide
aacgggacuauagcauacuuacuga

SEQ ID NO: 10520 - RNA, 25 nt, Artificial Sequence
  Synthetic Oligonucleotide
aacgaaacucuagcauacuuacuga

SEQ ID NO: 10521 - RNA, 25 nt, Artificial Sequence
  Synthetic Oligonucleotide
aaagagacucuagcauacuuacuga

SEQ ID NO: 10522 - RNA, 25 nt, Artificial Sequence
  Synthetic Oligonucleotide
cgggacucuagcauacuuacugaua

SEQ ID NO: 10523 - RNA, 25 nt, Artificial Sequence
  Synthetic Oligonucleotide
cgggacucuagcauacuuaccgaca

SEQ ID NO: 10524 - RNA, 25 nt, Artificial Sequence
  Synthetic Oligonucleotide
cgggacuuuagcauacuuacugaca

SEQ ID NO: 10525 - RNA, 25 nt, Artificial Sequence
  Synthetic Oligonucleotide
cgggacucuagcaugcuuacugaca

SEQ ID NO: 10526 - RNA, 25 nt, Artificial Sequence
  Synthetic Oligonucleotide
ugggacucuagcauacuuacugaca

SEQ ID NO: 10527 - RNA, 25 nt, Artificial Sequence
  Synthetic Oligonucleotide
cgagacucuagcauacuuacugaca

SEQ ID NO: 10528 - RNA, 25 nt, Artificial Sequence
  Synthetic Oligonucleotide
cgggacuccagcauacuuacugaca

SEQ ID NO: 10529 - RNA, 25 nt, Artificial Sequence
  Synthetic Oligonucleotide
cggaacucuagcauacuuacugaca

SEQ ID NO: 10530 - RNA, 25 nt, Artificial Sequence
  Synthetic Oligonucleotide
agggacucuagcauacuuacugaca

SEQ ID NO: 10531 - RNA, 25 nt, Artificial Sequence
  Synthetic Oligonucleotide
cgggacucuagcagacuuacugaca

SEQ ID NO: 10532 - RNA, 25 nt, Artificial Sequence
  Synthetic Oligonucleotide
cgggacucuaacauacuuacugaca

SEQ ID NO: 10533 - RNA, 25 nt, Artificial Sequence
  Synthetic Oligonucleotide
cgggacuauagcauacuuacugaca

SEQ ID NO: 10534 - RNA, 25 nt, Artificial Sequence
  Synthetic Oligonucleotide
cgagacucuagcauacuuacugaua

SEQ ID NO: 10535 - RNA, 25 nt, Artificial Sequence
  Synthetic Oligonucleotide
cgaaacucuagcauacuuacugaca

SEQ ID NO: 10536 - RNA, 25 nt, Artificial Sequence
  Synthetic Oligonucleotide
agagacucuagcauacuuacugaca

SEQ ID NO: 10537 - RNA, 25 nt, Artificial Sequence
  Synthetic Oligonucleotide
acgggacucuagcauacuuacugau

SEQ ID NO: 10538 - RNA, 25 nt, Artificial Sequence
  Synthetic Oligonucleotide
acgggacucuagcauacuuaccgac

SEQ ID NO: 10539 - RNA, 25 nt, Artificial Sequence
  Synthetic Oligonucleotide
acgggacuuuagcauacuuacugac

SEQ ID NO: 10540 - RNA, 25 nt, Artificial Sequence
  Synthetic Oligonucleotide
acgggacucuagcaugcuuacugac

SEQ ID NO: 10541 - RNA, 25 nt, Artificial Sequence
  Synthetic Oligonucleotide
augggacucuagcauacuuacugac

SEQ ID NO: 10542 - RNA, 25 nt, Artificial Sequence
  Synthetic Oligonucleotide
acgagacucuagcauacuuacugac

SEQ ID NO: 10543 - RNA, 25 nt, Artificial Sequence
  Synthetic Oligonucleotide
acgggacuccagcauacuuacugac

SEQ ID NO: 10544 - RNA, 25 nt, Artificial Sequence
  Synthetic Oligonucleotide
acggaacucuagcauacuuacugac

SEQ ID NO: 10545 - RNA, 25 nt, Artificial Sequence
  Synthetic Oligonucleotide
aagggacucuagcauacuuacugac

SEQ ID NO: 10546 - RNA, 25 nt, Artificial Sequence
  Synthetic Oligonucleotide
acgggacucuagcagacuuacugac

SEQ ID NO: 10547 - RNA, 25 nt, Artificial Sequence
  Synthetic Oligonucleotide
acgggacucuaacauacuuacugac

SEQ ID NO: 10548 - RNA, 25 nt, Artificial Sequence
  Synthetic Oligonucleotide
acgggacuauagcauacuuacugac

SEQ ID NO: 10549 - RNA, 25 nt, Artificial Sequence
  Synthetic Oligonucleotide
acgagacucuagcauacuuacugau

SEQ ID NO: 10550 - RNA, 25 nt, Artificial Sequence
  Synthetic Oligonucleotide
acgaaacucuagcauacuuacugac

SEQ ID NO: 10551 - RNA, 25 nt, Artificial Sequence
  Synthetic Oligonucleotide
aagagacucuagcauacuuacugac

SEQ ID NO: 10552 - RNA, 25 nt, Artificial Sequence
  Synthetic Oligonucleotide
ggacucuagcauacuuacugacagu

SEQ ID NO: 10553 - RNA, 25 nt, Artificial Sequence
  Synthetic Oligonucleotide
ggacucuagcauacuuacugauagc

SEQ ID NO: 10554 - RNA, 25 nt, Artificial Sequence
  Synthetic Oligonucleotide
ggacuuuagcauacuuacugacagc

SEQ ID NO: 10555 - RNA, 25 nt, Artificial Sequence
  Synthetic Oligonucleotide
ggacucuagcaugcuuacugacagc

SEQ ID NO: 10556 - RNA, 25 nt, Artificial Sequence
  Synthetic Oligonucleotide
agacucuagcauacuuacugacagc

SEQ ID NO: 10557 - RNA, 25 nt, Artificial Sequence
  Synthetic Oligonucleotide
ggacuccagcauacuuacugacagc

SEQ ID NO: 10558 - RNA, 25 nt, Artificial Sequence
  Synthetic Oligonucleotide
gaacucuagcauacuuacugacagc

SEQ ID NO: 10559 - RNA, 25 nt, Artificial Sequence
  Synthetic Oligonucleotide
ggacucuagcauacuuaccgacagc

SEQ ID NO: 10560 - RNA, 25 nt, Artificial Sequence
  Synthetic Oligonucleotide
ggacucuagcagacuuacugacagc

SEQ ID NO: 10561 - RNA, 25 nt, Artificial Sequence
  Synthetic Oligonucleotide
ggacucuaacauacuuacugacagc

SEQ ID NO: 10562 - RNA, 25 nt, Artificial Sequence
  Synthetic Oligonucleotide
ggacuauagcauacuuacugacagc

SEQ ID NO: 10563 - RNA, 25 nt, Artificial Sequence
  Synthetic Oligonucleotide
agacucuagcauacuuacugauagc

SEQ ID NO: 10564 - RNA, 25 nt, Artificial Sequence
  Synthetic Oligonucleotide
aaacucuagcauacuuacugacagc

SEQ ID NO: 10565 - RNA, 25 nt, Artificial Sequence
  Synthetic Oligonucleotide
aaagguuaaaacauggaacuuuugg

SEQ ID NO: 10566 - RNA, 25 nt, Artificial Sequence
  Synthetic Oligonucleotide
aaagguuaaaacauggaaccuucgg

SEQ ID NO: 10567 - RNA, 25 nt, Artificial Sequence
  Synthetic Oligonucleotide
aaagguuaaaacauggaaccuuuag

SEQ ID NO: 10568 - RNA, 25 nt, Artificial Sequence
  Synthetic Oligonucleotide
aaagguuaaaacauggaaccuuwgg

SEQ ID NO: 10569 - RNA, 25 nt, Artificial Sequence
  Synthetic Oligonucleotide
aaagguuaaaacauggaacauuugg

SEQ ID NO: 10570 - RNA, 25 nt, Artificial Sequence
  Synthetic Oligonucleotide
aaagguuaaaacauggaacauucgg

SEQ ID NO: 10571 - RNA, 25 nt, Artificial Sequence
  Synthetic Oligonucleotide
aaagguuaaaacaugggaccuuugg

SEQ ID NO: 10572 - RNA, 25 nt, Artificial Sequence
  Synthetic Oligonucleotide
aaagguugaaacauggaaccuuugg

SEQ ID NO: 10573 - RNA, 25 nt, Artificial Sequence
  Synthetic Oligonucleotide
aaagguuaaagcauggaaccuuugg

SEQ ID NO: 10574 - RNA, 25 nt, Artificial Sequence
  Synthetic Oligonucleotide
aaagguuaaaaaauggaaccuuugg

SEQ ID NO: 10575 - RNA, 25 nt, Artificial Sequence
  Synthetic Oligonucleotide
aaagauuaaaacauggaaccuuugg

SEQ ID NO: 10576 - RNA, 25 nt, Artificial Sequence
  Synthetic Oligonucleotide
aaagguuaaaacacggaaccuuugg

SEQ ID NO: 10577 - RNA, 25 nt, Artificial Sequence
  Synthetic Oligonucleotide
aaagguuaaaacaugguaccuuugg

SEQ ID NO: 10578 - RNA, 25 nt, Artificial Sequence
  Synthetic Oligonucleotide
aaagguuaagacauggaaccuucgg

SEQ ID NO: 10579 - RNA, 25 nt, Artificial Sequence
  Synthetic Oligonucleotide
aaagauuaaaacauggaaccuucgg

SEQ ID NO: 10580 - RNA, 25 nt, Artificial Sequence
  Synthetic Oligonucleotide
aaaggcuaaaacauggaaccuucgg

SEQ ID NO: 10581 - RNA, 25 nt, Artificial Sequence
  Synthetic Oligonucleotide
aaagguuaaaacacggaacauucgg

SEQ ID NO: 10582 - RNA, 25 nt, Artificial Sequence
  Synthetic Oligonucleotide
aaagguuaaagcaugggacuuuugg

SEQ ID NO: 10583 - RNA, 25 nt, Artificial Sequence
  Synthetic Oligonucleotide
aaaggcuaaagcauggaaccuuugg

SEQ ID NO: 10584 - RNA, 25 nt, Artificial Sequence
  Synthetic Oligonucleotide
aaagguuaaagcacggaaccuuugg

SEQ ID NO: 10585 - RNA, 25 nt, Artificial Sequence
  Synthetic Oligonucleotide
aaagauuaaaacacggaaccuuugg

SEQ ID NO: 10586 - RNA, 25 nt, Artificial Sequence
  Synthetic Oligonucleotide
aaagauuaaaacacggaaccuucgg

SEQ ID NO: 10587 - RNA, 25 nt, Artificial Sequence
  Synthetic Oligonucleotide
aaagguuaaggcaugggacauuugg

SEQ ID NO: 10588 - RNA, 25 nt, Artificial Sequence
  Synthetic Oligonucleotide
aaagauuaaaacacgggaccuuugg

SEQ ID NO: 10589 - RNA, 25 nt, Artificial Sequence
  Synthetic Oligonucleotide
gaaagguuaaaacauggaacuuuug

SEQ ID NO: 10590 - RNA, 25 nt, Artificial Sequence
  Synthetic Oligonucleotide
gaaagguuaaaacauggaaccuucg

SEQ ID NO: 10591 - RNA, 25 nt, Artificial Sequence
  Synthetic Oligonucleotide
gaaagguuaaaacauggaaccuuua

SEQ ID NO: 10592 - RNA, 25 nt, Artificial Sequence
  Synthetic Oligonucleotide
gaaagguuaaaacauggaaccuuwg

SEQ ID NO: 10593 - RNA, 25 nt, Artificial Sequence
  Synthetic Oligonucleotide
gaaagguuaaaacauggaacauuug

SEQ ID NO: 10594 - RNA, 25 nt, Artificial Sequence
  Synthetic Oligonucleotide
gaaagguuaaaacauggaacauucg

SEQ ID NO: 10595 - RNA, 25 nt, Artificial Sequence
  Synthetic Oligonucleotide
gaaagguuaaaacaugggaccuuug

SEQ ID NO: 10596 - RNA, 25 nt, Artificial Sequence
  Synthetic Oligonucleotide
gaaagguugaaacauggaaccuuug

SEQ ID NO: 10597 - RNA, 25 nt, Artificial Sequence
  Synthetic Oligonucleotide
gaaagguuaaagcauggaaccuuug

SEQ ID NO: 10598 - RNA, 25 nt, Artificial Sequence
  Synthetic Oligonucleotide
gaaagguuaaaaaauggaaccuuug

SEQ ID NO: 10599 - RNA, 25 nt, Artificial Sequence
  Synthetic Oligonucleotide
gaaagauuaaaacauggaaccuuug

SEQ ID NO: 10600 - RNA, 25 nt, Artificial Sequence
  Synthetic Oligonucleotide
gaaagguuaaaacacggaaccuuug

SEQ ID NO: 10601 - RNA, 25 nt, Artificial Sequence
  Synthetic Oligonucleotide
gaaagguuaaaacaugguaccuuug

SEQ ID NO: 10602 - RNA, 25 nt, Artificial Sequence
  Synthetic Oligonucleotide
aaaagguuaaaacauggaaccuuug

SEQ ID NO: 10603 - RNA, 25 nt, Artificial Sequence
  Synthetic Oligonucleotide
gaaagguuaagacauggaaccuucg

SEQ ID NO: 10604 - RNA, 25 nt, Artificial Sequence
  Synthetic Oligonucleotide
gaaagauuaaaacauggaaccuucg

SEQ ID NO: 10605 - RNA, 25 nt, Artificial Sequence
  Synthetic Oligonucleotide
gaaaggcuaaaacauggaaccuucg

SEQ ID NO: 10606 - RNA, 25 nt, Artificial Sequence
  Synthetic Oligonucleotide
gaaagguuaaaacacggaacauucg

SEQ ID NO: 10607 - RNA, 25 nt, Artificial Sequence
  Synthetic Oligonucleotide
gaaagguuaaagcaugggacuuuug

SEQ ID NO: 10608 - RNA, 25 nt, Artificial Sequence
  Synthetic Oligonucleotide
gaaaggcuaaagcauggaaccuuug

SEQ ID NO: 10609 - RNA, 25 nt, Artificial Sequence
  Synthetic Oligonucleotide
gaaagguuaaagcacggaaccuuug

SEQ ID NO: 10610 - RNA, 25 nt, Artificial Sequence
  Synthetic Oligonucleotide
gaaagauuaaaacacggaaccuuug

SEQ ID NO: 10611 - RNA, 25 nt, Artificial Sequence
  Synthetic Oligonucleotide
gaaagauuaaaacacggaaccuucg

SEQ ID NO: 10612 - RNA, 25 nt, Artificial Sequence
  Synthetic Oligonucleotide
gaaagguuaaggcaugggacauuug

SEQ ID NO: 10613 - RNA, 25 nt, Artificial Sequence
  Synthetic Oligonucleotide
gaaagauuaaaacacgggaccuuug

SEQ ID NO: 10614 - RNA, 25 nt, Artificial Sequence
  Synthetic Oligonucleotide
augaaacgaaaacgggacuccagca

SEQ ID NO: 10615 - RNA, 25 nt, Artificial Sequence
  Synthetic Oligonucleotide
augaaacgaaaacgggacucuaaca

SEQ ID NO: 10616 - RNA, 25 nt, Artificial Sequence
  Synthetic Oligonucleotide
augaaacgaaaacgggacuauagca

SEQ ID NO: 10617 - RNA, 25 nt, Artificial Sequence
  Synthetic Oligonucleotide
augaaacggaaacgggacucuagca

SEQ ID NO: 10618 - RNA, 25 nt, Artificial Sequence
  Synthetic Oligonucleotide
augaaacgaaaaugggacucuagca

SEQ ID NO: 10619 - RNA, 25 nt, Artificial Sequence
  Synthetic Oligonucleotide
augaaacggaaacgggacuuuagca

SEQ ID NO: 10620 - RNA, 25 nt, Artificial Sequence
  Synthetic Oligonucleotide
augaaacgaaaacgagacucuagca

SEQ ID NO: 10621 - RNA, 25 nt, Artificial Sequence
  Synthetic Oligonucleotide
augaaacgaaaacggaacucuagca

SEQ ID NO: 10622 - RNA, 25 nt, Artificial Sequence
  Synthetic Oligonucleotide
augaaacgaaaaagggacucuagca

SEQ ID NO: 10623 - RNA, 25 nt, Artificial Sequence
  Synthetic Oligonucleotide
augaaacggaaacgagacucuagca

SEQ ID NO: 10624 - RNA, 25 nt, Artificial Sequence
  Synthetic Oligonucleotide
augaaacggaaacggaacucuagca

SEQ ID NO: 10625 - RNA, 25 nt, Artificial Sequence
  Synthetic Oligonucleotide
augaaacggaaacgaaacucuagca

SEQ ID NO: 10626 - RNA, 25 nt, Artificial Sequence
  Synthetic Oligonucleotide
augaaacggaaaagagacucuagca

SEQ ID NO: 10627 - RNA, 25 nt, Artificial Sequence
  Synthetic Oligonucleotide
ugaugguugcauacauguuggagag

SEQ ID NO: 10628 - RNA, 25 nt, Artificial Sequence
  Synthetic Oligonucleotide
ugaugguugcauacauguuagaaag

SEQ ID NO: 10629 - RNA, 25 nt, Artificial Sequence
  Synthetic Oligonucleotide
ugaugguugcauacauguuaaagag

SEQ ID NO: 10630 - RNA, 25 nt, Artificial Sequence
  Synthetic Oligonucleotide
ugaugguugcauacauguuggaaag

SEQ ID NO: 10631 - RNA, 25 nt, Artificial Sequence
  Synthetic Oligonucleotide
ugaugguugcguacauguuagagag

SEQ ID NO: 10632 - RNA, 25 nt, Artificial Sequence
  Synthetic Oligonucleotide
uaaugguugcauacauguuagagag

SEQ ID NO: 10633 - RNA, 25 nt, Artificial Sequence
  Synthetic Oligonucleotide
ugauggucgcauacauguuagagag

SEQ ID NO: 10634 - RNA, 25 nt, Artificial Sequence
  Synthetic Oligonucleotide
ugaugauugcauacauguuagagag

SEQ ID NO: 10635 - RNA, 25 nt, Artificial Sequence
  Synthetic Oligonucleotide
ugaugguggcauacauguuggagag

SEQ ID NO: 10636 - RNA, 25 nt, Artificial Sequence
  Synthetic Oligonucleotide
ugaugguugcauacaugcuagaaag

SEQ ID NO: 10637 - RNA, 25 nt, Artificial Sequence
  Synthetic Oligonucleotide
uaaugguugcauacauguuggaaag

SEQ ID NO: 10638 - RNA, 25 nt, Artificial Sequence
  Synthetic Oligonucleotide
ugaugguggcauacauguuggaaag

SEQ ID NO: 10639 - RNA, 25 nt, Artificial Sequence
  Synthetic Oligonucleotide
uaaugguggcauacauguuggagag

SEQ ID NO: 10640 - RNA, 25 nt, Artificial Sequence
  Synthetic Oligonucleotide
ugaugguggcauacaugcuagaaag

SEQ ID NO: 10641 - RNA, 25 nt, Artificial Sequence
  Synthetic Oligonucleotide
uaaugguggcauacauguuggaaag

SEQ ID NO: 10642 - RNA, 25 nt, Artificial Sequence
  Synthetic Oligonucleotide
uaaugguggcauauauguuggaaag

SEQ ID NO: 10643 - RNA, 25 nt, Artificial Sequence
  Synthetic Oligonucleotide
ugaaacgaaaacgggacuccagcau

SEQ ID NO: 10644 - RNA, 25 nt, Artificial Sequence
  Synthetic Oligonucleotide
ugaaacgaaaacgggacucuagcag

SEQ ID NO: 10645 - RNA, 25 nt, Artificial Sequence
  Synthetic Oligonucleotide
ugaaacgaaaacgggacucuaacau

SEQ ID NO: 10646 - RNA, 25 nt, Artificial Sequence
  Synthetic Oligonucleotide
ugaaacggaaacgggacucuagcau

SEQ ID NO: 10647 - RNA, 25 nt, Artificial Sequence
  Synthetic Oligonucleotide
ugaaacgaaaaugggacucuagcau

SEQ ID NO: 10648 - RNA, 25 nt, Artificial Sequence
  Synthetic Oligonucleotide
ugaaacgaaaacgagacucuagcau

SEQ ID NO: 10649 - RNA, 25 nt, Artificial Sequence
  Synthetic Oligonucleotide
ugaaacgaaaacggaacucuagcau

SEQ ID NO: 10650 - RNA, 25 nt, Artificial Sequence
  Synthetic Oligonucleotide
ugaaacgaaaaagggacucuagcau

SEQ ID NO: 10651 - RNA, 25 nt, Artificial Sequence
  Synthetic Oligonucleotide
ugaaacgaaaacgggacuauagcau

SEQ ID NO: 10652 - RNA, 25 nt, Artificial Sequence
  Synthetic Oligonucleotide
ugaaacggaaacgggacuuuagcau

SEQ ID NO: 10653 - RNA, 25 nt, Artificial Sequence
  Synthetic Oligonucleotide
ugaaacggaaacgagacucuagcau

SEQ ID NO: 10654 - RNA, 25 nt, Artificial Sequence
  Synthetic Oligonucleotide
ugaaacggaaacggaacucuagcau

SEQ ID NO: 10655 - RNA, 25 nt, Artificial Sequence
  Synthetic Oligonucleotide
ugaaacggaaacgaaacucuagcau

SEQ ID NO: 10656 - RNA, 25 nt, Artificial Sequence
  Synthetic Oligonucleotide
ugaaacggaaaagagacucuagcau

SEQ ID NO: 10657 - RNA, 25 nt, Artificial Sequence
  Synthetic Oligonucleotide
gaaacgaaaacgggacucuagcaug

SEQ ID NO: 10658 - RNA, 25 nt, Artificial Sequence
  Synthetic Oligonucleotide
gaaacgaaaacgggacucuagcaga

SEQ ID NO: 10659 - RNA, 25 nt, Artificial Sequence
  Synthetic Oligonucleotide
gaaacgaaaacgggacucuaacaua

SEQ ID NO: 10660 - RNA, 25 nt, Artificial Sequence
  Synthetic Oligonucleotide
gaaacggaaacgggacucuagcaua

SEQ ID NO: 10661 - RNA, 25 nt, Artificial Sequence
  Synthetic Oligonucleotide
gaaacgaaaaugggacucuagcaua

SEQ ID NO: 10662 - RNA, 25 nt, Artificial Sequence
  Synthetic Oligonucleotide
gaaacgaaaacgggacuccagcaua

SEQ ID NO: 10663 - RNA, 25 nt, Artificial Sequence
  Synthetic Oligonucleotide
gaaacgaaaacgagacucuagcaua

SEQ ID NO: 10664 - RNA, 25 nt, Artificial Sequence
  Synthetic Oligonucleotide
gaaacgaaaacggaacucuagcaua

SEQ ID NO: 10665 - RNA, 25 nt, Artificial Sequence
  Synthetic Oligonucleotide
gaaacgaaaaagggacucuagcaua

SEQ ID NO: 10666 - RNA, 25 nt, Artificial Sequence
  Synthetic Oligonucleotide
gaaacgaaaacgggacuauagcaua

SEQ ID NO: 10667 - RNA, 25 nt, Artificial Sequence
  Synthetic Oligonucleotide
gaaacggaaacgggacuuuagcaua

SEQ ID NO: 10668 - RNA, 25 nt, Artificial Sequence
  Synthetic Oligonucleotide
gaaacggaaacgagacucuagcaua

SEQ ID NO: 10669 - RNA, 25 nt, Artificial Sequence
  Synthetic Oligonucleotide
gaaacggaaacggaacucuagcaua

SEQ ID NO: 10670 - RNA, 25 nt, Artificial Sequence
  Synthetic Oligonucleotide
gaaacggaaacgaaacucuagcaua

SEQ ID NO: 10671 - RNA, 25 nt, Artificial Sequence
  Synthetic Oligonucleotide
gaaacggaaaagagacucuagcaua

SEQ ID NO: 10672 - RNA, 25 nt, Artificial Sequence
  Synthetic Oligonucleotide
aaacgaaaacgggacucuagcaugc

SEQ ID NO: 10673 - RNA, 25 nt, Artificial Sequence
  Synthetic Oligonucleotide
aaacgaaaacgggacucuagcagac

SEQ ID NO: 10674 - RNA, 25 nt, Artificial Sequence
  Synthetic Oligonucleotide
aaacgaaaacgggacucuaacauac

SEQ ID NO: 10675 - RNA, 25 nt, Artificial Sequence
  Synthetic Oligonucleotide
aaacggaaacgggacucuagcauac

SEQ ID NO: 10676 - RNA, 25 nt, Artificial Sequence
  Synthetic Oligonucleotide
aaacgaaaaugggacucuagcauac

SEQ ID NO: 10677 - RNA, 25 nt, Artificial Sequence
  Synthetic Oligonucleotide
aaacgaaaacgggacuccagcauac

SEQ ID NO: 10678 - RNA, 25 nt, Artificial Sequence
  Synthetic Oligonucleotide
aaacgaaaacgagacucuagcauac

SEQ ID NO: 10679 - RNA, 25 nt, Artificial Sequence
  Synthetic Oligonucleotide
aaacgaaaacggaacucuagcauac

SEQ ID NO: 10680 - RNA, 25 nt, Artificial Sequence
  Synthetic Oligonucleotide
aaacgaaaaagggacucuagcauac

SEQ ID NO: 10681 - RNA, 25 nt, Artificial Sequence
  Synthetic Oligonucleotide
aaacgaaaacgggacuauagcauac

SEQ ID NO: 10682 - RNA, 25 nt, Artificial Sequence
  Synthetic Oligonucleotide
aaacggaaacgggacuuuagcauac

SEQ ID NO: 10683 - RNA, 25 nt, Artificial Sequence
  Synthetic Oligonucleotide
aaacggaaacgagacucuagcauac

SEQ ID NO: 10684 - RNA, 25 nt, Artificial Sequence
  Synthetic Oligonucleotide
aaacggaaacggaacucuagcauac

SEQ ID NO: 10685 - RNA, 25 nt, Artificial Sequence
  Synthetic Oligonucleotide
aaacggaaacgaaacucuagcauac

SEQ ID NO: 10686 - RNA, 25 nt, Artificial Sequence
  Synthetic Oligonucleotide
aaacggaaaagagacucuagcauac

SEQ ID NO: 10687 - RNA, 25 nt, Artificial Sequence
  Synthetic Oligonucleotide
gaaaacgggacucuagcaugcuuac

SEQ ID NO: 10688 - RNA, 25 nt, Artificial Sequence
  Synthetic Oligonucleotide
ggaaacgggacucuagcauacuuac

SEQ ID NO: 10689 - RNA, 25 nt, Artificial Sequence
  Synthetic Oligonucleotide
gaaaaugggacucuagcauacuuac

SEQ ID NO: 10690 - RNA, 25 nt, Artificial Sequence
  Synthetic Oligonucleotide
gaaaacgggacuccagcauacuuac

SEQ ID NO: 10691 - RNA, 25 nt, Artificial Sequence
  Synthetic Oligonucleotide
gaaaacgagacucuagcauacuuac

SEQ ID NO: 10692 - RNA, 25 nt, Artificial Sequence
  Synthetic Oligonucleotide
gaaaacggaacucuagcauacuuac

SEQ ID NO: 10693 - RNA, 25 nt, Artificial Sequence
  Synthetic Oligonucleotide
gaaaaagggacucuagcauacuuac

SEQ ID NO: 10694 - RNA, 25 nt, Artificial Sequence
  Synthetic Oligonucleotide
gaaaacgggacucuagcagacuuac

SEQ ID NO: 10695 - RNA, 25 nt, Artificial Sequence
  Synthetic Oligonucleotide
gaaaacgggacucuaacauacuuac

SEQ ID NO: 10696 - RNA, 25 nt, Artificial Sequence
  Synthetic Oligonucleotide
gaaaacgggacuauagcauacuuac

SEQ ID NO: 10697 - RNA, 25 nt, Artificial Sequence
  Synthetic Oligonucleotide
ggaaacgggacuuuagcauacuuac

SEQ ID NO: 10698 - RNA, 25 nt, Artificial Sequence
  Synthetic Oligonucleotide
ggaaacgagacucuagcauacuuac

SEQ ID NO: 10699 - RNA, 25 nt, Artificial Sequence
  Synthetic Oligonucleotide
ggaaacggaacucuagcauacuuac

SEQ ID NO: 10700 - RNA, 25 nt, Artificial Sequence
  Synthetic Oligonucleotide
ggaaacgaaacucuagcauacuuac

SEQ ID NO: 10701 - RNA, 25 nt, Artificial Sequence
  Synthetic Oligonucleotide
ggaaaagagacucuagcauacuuac

SEQ ID NO: 10702 - RNA, 25 nt, Artificial Sequence
  Synthetic Oligonucleotide
aacgaaaacgggacucuagcaugcu

SEQ ID NO: 10703 - RNA, 25 nt, Artificial Sequence
  Synthetic Oligonucleotide
aacgaaaacgggacucuagcagacu

SEQ ID NO: 10704 - RNA, 25 nt, Artificial Sequence
  Synthetic Oligonucleotide
aacggaaacgggacucuagcauacu

SEQ ID NO: 10705 - RNA, 25 nt, Artificial Sequence
  Synthetic Oligonucleotide
aacgaaaaugggacucuagcauacu

SEQ ID NO: 10706 - RNA, 25 nt, Artificial Sequence
  Synthetic Oligonucleotide
aacgaaaacgggacuccagcauacu

SEQ ID NO: 10707 - RNA, 25 nt, Artificial Sequence
  Synthetic Oligonucleotide
aacgaaaacgagacucuagcauacu

SEQ ID NO: 10708 - RNA, 25 nt, Artificial Sequence
  Synthetic Oligonucleotide
aacgaaaacggaacucuagcauacu

SEQ ID NO: 10709 - RNA, 25 nt, Artificial Sequence
  Synthetic Oligonucleotide
aacgaaaaagggacucuagcauacu

SEQ ID NO: 10710 - RNA, 25 nt, Artificial Sequence
  Synthetic Oligonucleotide
aacgaaaacgggacucuaacauacu

SEQ ID NO: 10711 - RNA, 25 nt, Artificial Sequence
  Synthetic Oligonucleotide
aacgaaaacgggacuauagcauacu

SEQ ID NO: 10712 - RNA, 25 nt, Artificial Sequence
  Synthetic Oligonucleotide
aacggaaacgggacuuuagcauacu

SEQ ID NO: 10713 - RNA, 25 nt, Artificial Sequence
  Synthetic Oligonucleotide
aacggaaacgagacucuagcauacu

SEQ ID NO: 10714 - RNA, 25 nt, Artificial Sequence
  Synthetic Oligonucleotide
aacggaaacggaacucuagcauacu

SEQ ID NO: 10715 - RNA, 25 nt, Artificial Sequence
  Synthetic Oligonucleotide
aacggaaacgaaacucuagcauacu

SEQ ID NO: 10716 - RNA, 25 nt, Artificial Sequence
  Synthetic Oligonucleotide
aacggaaaagagacucuagcauacu

SEQ ID NO: 10717 - RNA, 25 nt, Artificial Sequence
  Synthetic Oligonucleotide
cgaaaacgggacucuagcaugcuua

SEQ ID NO: 10718 - RNA, 25 nt, Artificial Sequence
  Synthetic Oligonucleotide
cgaaaacgggacucuagcagacuua

SEQ ID NO: 10719 - RNA, 25 nt, Artificial Sequence
  Synthetic Oligonucleotide
cggaaacgggacucuagcauacuua

SEQ ID NO: 10720 - RNA, 25 nt, Artificial Sequence
  Synthetic Oligonucleotide
cgaaaaugggacucuagcauacuua

SEQ ID NO: 10721 - RNA, 25 nt, Artificial Sequence
  Synthetic Oligonucleotide
cgaaaacgggacuccagcauacuua

SEQ ID NO: 10722 - RNA, 25 nt, Artificial Sequence
  Synthetic Oligonucleotide
cgaaaacgagacucuagcauacuua

SEQ ID NO: 10723 - RNA, 25 nt, Artificial Sequence
  Synthetic Oligonucleotide
cgaaaacggaacucuagcauacuua

SEQ ID NO: 10724 - RNA, 25 nt, Artificial Sequence
  Synthetic Oligonucleotide
cgaaaaagggacucuagcauacuua

SEQ ID NO: 10725 - RNA, 25 nt, Artificial Sequence
  Synthetic Oligonucleotide
cgaaaacgggacucuaacauacuua

SEQ ID NO: 10726 - RNA, 25 nt, Artificial Sequence
  Synthetic Oligonucleotide
cgaaaacgggacuauagcauacuua

SEQ ID NO: 10727 - RNA, 25 nt, Artificial Sequence
  Synthetic Oligonucleotide
cggaaacgggacuuuagcauacuua

SEQ ID NO: 10728 - RNA, 25 nt, Artificial Sequence
  Synthetic Oligonucleotide
cggaaacgagacucuagcauacuua

SEQ ID NO: 10729 - RNA, 25 nt, Artificial Sequence
  Synthetic Oligonucleotide
cggaaacggaacucuagcauacuua

SEQ ID NO: 10730 - RNA, 25 nt, Artificial Sequence
  Synthetic Oligonucleotide
cggaaacgaaacucuagcauacuua

SEQ ID NO: 10731 - RNA, 25 nt, Artificial Sequence
  Synthetic Oligonucleotide
cggaaaagagacucuagcauacuua

SEQ ID NO: 10732 - RNA, 25 nt, Artificial Sequence
  Synthetic Oligonucleotide
acgaaaacgggacucuagcaugcuu

SEQ ID NO: 10733 - RNA, 25 nt, Artificial Sequence
  Synthetic Oligonucleotide
acgaaaacgggacucuagcagacuu

SEQ ID NO: 10734 - RNA, 25 nt, Artificial Sequence
  Synthetic Oligonucleotide
acggaaacgggacucuagcauacuu

SEQ ID NO: 10735 - RNA, 25 nt, Artificial Sequence
  Synthetic Oligonucleotide
acgaaaaugggacucuagcauacuu

SEQ ID NO: 10736 - RNA, 25 nt, Artificial Sequence
  Synthetic Oligonucleotide
acgaaaacgggacuccagcauacuu

SEQ ID NO: 10737 - RNA, 25 nt, Artificial Sequence
  Synthetic Oligonucleotide
acgaaaacgagacucuagcauacuu

SEQ ID NO: 10738 - RNA, 25 nt, Artificial Sequence
  Synthetic Oligonucleotide
acgaaaacggaacucuagcauacuu

SEQ ID NO: 10739 - RNA, 25 nt, Artificial Sequence
  Synthetic Oligonucleotide
acgaaaaagggacucuagcauacuu

SEQ ID NO: 10740 - RNA, 25 nt, Artificial Sequence
  Synthetic Oligonucleotide
acgaaaacgggacucuaacauacuu

SEQ ID NO: 10741 - RNA, 25 nt, Artificial Sequence
  Synthetic Oligonucleotide
acgaaaacgggacuauagcauacuu

SEQ ID NO: 10742 - RNA, 25 nt, Artificial Sequence
  Synthetic Oligonucleotide
acggaaacgggacuuuagcauacuu

SEQ ID NO: 10743 - RNA, 25 nt, Artificial Sequence
  Synthetic Oligonucleotide
acggaaacgagacucuagcauacuu

SEQ ID NO: 10744 - RNA, 25 nt, Artificial Sequence
  Synthetic Oligonucleotide
acggaaacggaacucuagcauacuu

SEQ ID NO: 10745 - RNA, 25 nt, Artificial Sequence
  Synthetic Oligonucleotide
acggaaacgaaacucuagcauacuu

SEQ ID NO: 10746 - RNA, 25 nt, Artificial Sequence
  Synthetic Oligonucleotide
acggaaaagagacucuagcauacuu

SEQ ID NO: 10747 - RNA, 25 nt, Artificial Sequence
  Synthetic Oligonucleotide
aaaacgggacucuagcauacuuacc

SEQ ID NO: 10748 - RNA, 25 nt, Artificial Sequence
  Synthetic Oligonucleotide
gaaacgggacucuagcauacuuacu

SEQ ID NO: 10749 - RNA, 25 nt, Artificial Sequence
  Synthetic Oligonucleotide
aaaacgggacucuagcaugcuuacu

SEQ ID NO: 10750 - RNA, 25 nt, Artificial Sequence
  Synthetic Oligonucleotide
aaaaugggacucuagcauacuuacu

SEQ ID NO: 10751 - RNA, 25 nt, Artificial Sequence
  Synthetic Oligonucleotide
aaaacgggacuccagcauacuuacu

SEQ ID NO: 10752 - RNA, 25 nt, Artificial Sequence
  Synthetic Oligonucleotide
aaaacgagacucuagcauacuuacu

SEQ ID NO: 10753 - RNA, 25 nt, Artificial Sequence
  Synthetic Oligonucleotide
aaaacggaacucuagcauacuuacu

SEQ ID NO: 10754 - RNA, 25 nt, Artificial Sequence
  Synthetic Oligonucleotide
aaaaagggacucuagcauacuuacu

SEQ ID NO: 10755 - RNA, 25 nt, Artificial Sequence
  Synthetic Oligonucleotide
aaaacgggacucuagcagacuuacu

SEQ ID NO: 10756 - RNA, 25 nt, Artificial Sequence
  Synthetic Oligonucleotide
aaaacgggacucuaacauacuuacu

SEQ ID NO: 10757 - RNA, 25 nt, Artificial Sequence
  Synthetic Oligonucleotide
aaaacgggacuauagcauacuuacu

SEQ ID NO: 10758 - RNA, 25 nt, Artificial Sequence
  Synthetic Oligonucleotide
gaaacgggacuuuagcauacuuacu

SEQ ID NO: 10759 - RNA, 25 nt, Artificial Sequence
  Synthetic Oligonucleotide
gaaacgagacucuagcauacuuacu

SEQ ID NO: 10760 - RNA, 25 nt, Artificial Sequence
  Synthetic Oligonucleotide
gaaacggaacucuagcauacuuacu

SEQ ID NO: 10761 - RNA, 25 nt, Artificial Sequence
  Synthetic Oligonucleotide
gaaacgaaacucuagcauacuuacu

SEQ ID NO: 10762 - RNA, 25 nt, Artificial Sequence
  Synthetic Oligonucleotide
gaaaagagacucuagcauacuuacu

SEQ ID NO: 10763 - RNA, 25 nt, Artificial Sequence
  Synthetic Oligonucleotide
uugaugguugcauacauguuggaga

SEQ ID NO: 10764 - RNA, 25 nt, Artificial Sequence
  Synthetic Oligonucleotide
uugaugguugcauacauguuagaaa

SEQ ID NO: 10765 - RNA, 25 nt, Artificial Sequence
  Synthetic Oligonucleotide
uugaugguugcauacauguuaaaga

SEQ ID NO: 10766 - RNA, 25 nt, Artificial Sequence
  Synthetic Oligonucleotide
uugaugguugcauacauguuggaaa

SEQ ID NO: 10767 - RNA, 25 nt, Artificial Sequence
  Synthetic Oligonucleotide
uugaugguugcguacauguuagaga

SEQ ID NO: 10768 - RNA, 25 nt, Artificial Sequence
  Synthetic Oligonucleotide
cugaugguugcauacauguuagaga

SEQ ID NO: 10769 - RNA, 25 nt, Artificial Sequence
  Synthetic Oligonucleotide
uuaaugguugcauacauguuagaga

SEQ ID NO: 10770 - RNA, 25 nt, Artificial Sequence
  Synthetic Oligonucleotide
uugauggucgcauacauguuagaga

SEQ ID NO: 10771 - RNA, 25 nt, Artificial Sequence
  Synthetic Oligonucleotide
uugaugauugcauacauguuagaga

SEQ ID NO: 10772 - RNA, 25 nt, Artificial Sequence
  Synthetic Oligonucleotide
uugaugguggcauacauguuggaga

SEQ ID NO: 10773 - RNA, 25 nt, Artificial Sequence
  Synthetic Oligonucleotide
uugaugguugcauacaugcuagaaa

SEQ ID NO: 10774 - RNA, 25 nt, Artificial Sequence
  Synthetic Oligonucleotide
uuaaugguugcauacauguuggaaa

SEQ ID NO: 10775 - RNA, 25 nt, Artificial Sequence
  Synthetic Oligonucleotide
uugaugguggcauacauguuggaaa

SEQ ID NO: 10776 - RNA, 25 nt, Artificial Sequence
  Synthetic Oligonucleotide
cugaugguggcauacauguuggaga

SEQ ID NO: 10777 - RNA, 25 nt, Artificial Sequence
  Synthetic Oligonucleotide
uuaaugguggcauacauguuggaga

SEQ ID NO: 10778 - RNA, 25 nt, Artificial Sequence
  Synthetic Oligonucleotide
uugaugguggcauacaugcuagaaa

SEQ ID NO: 10779 - RNA, 25 nt, Artificial Sequence
  Synthetic Oligonucleotide
uuaaugguggcauacauguuggaaa

SEQ ID NO: 10780 - RNA, 25 nt, Artificial Sequence
  Synthetic Oligonucleotide
uuaaugguggcauauauguuggaaa

SEQ ID NO: 10781 - RNA, 25 nt, Artificial Sequence
  Synthetic Oligonucleotide
gguuaaaacauggaaccuuuggucc

SEQ ID NO: 10782 - RNA, 25 nt, Artificial Sequence
  Synthetic Oligonucleotide
gguuaaaacauggaaccuuuggacc

SEQ ID NO: 10783 - RNA, 25 nt, Artificial Sequence
  Synthetic Oligonucleotide
gguuaaaacauggaaccuuugggcc

SEQ ID NO: 10784 - RNA, 25 nt, Artificial Sequence
  Synthetic Oligonucleotide
gguuaaaacauggaaccuuuagccc

SEQ ID NO: 10785 - RNA, 25 nt, Artificial Sequence
  Synthetic Oligonucleotide
gguuaaaacauggaaccuucggccc

SEQ ID NO: 10786 - RNA, 25 nt, Artificial Sequence
  Synthetic Oligonucleotide
gguuaaaacauggaaccuuwggccc

SEQ ID NO: 10787 - RNA, 25 nt, Artificial Sequence
  Synthetic Oligonucleotide
gguuaaaacauggaaccuucggucc

SEQ ID NO: 10788 - RNA, 25 nt, Artificial Sequence
  Synthetic Oligonucleotide
gguuaaaacaugggaccuuuggccc

SEQ ID NO: 10789 - RNA, 25 nt, Artificial Sequence
  Synthetic Oligonucleotide
gguugaaacauggaaccuuuggccc

SEQ ID NO: 10790 - RNA, 25 nt, Artificial Sequence
  Synthetic Oligonucleotide
gguuaaaacauggaacuuuuggccc

SEQ ID NO: 10791 - RNA, 25 nt, Artificial Sequence
  Synthetic Oligonucleotide
gguuaaagcauggaaccuuuggccc

SEQ ID NO: 10792 - RNA, 25 nt, Artificial Sequence
  Synthetic Oligonucleotide
gguuaaaacaugggaccuuuggucc

SEQ ID NO: 10793 - RNA, 25 nt, Artificial Sequence
  Synthetic Oligonucleotide
gguuaaagcauggaaccuuuggucc

SEQ ID NO: 10794 - RNA, 25 nt, Artificial Sequence
  Synthetic Oligonucleotide
gguuaaaaaauggaaccuuuggccc

SEQ ID NO: 10795 - RNA, 25 nt, Artificial Sequence
  Synthetic Oligonucleotide
gauuaaaacauggaaccuuuggccc

SEQ ID NO: 10796 - RNA, 25 nt, Artificial Sequence
  Synthetic Oligonucleotide
gguuaaaacacggaaccuuuggccc

SEQ ID NO: 10797 - RNA, 25 nt, Artificial Sequence
  Synthetic Oligonucleotide
gguuaaaacaugguaccuuuggccc

SEQ ID NO: 10798 - RNA, 25 nt, Artificial Sequence
  Synthetic Oligonucleotide
gguuaaaacauggaacauuuggccc

SEQ ID NO: 10799 - RNA, 25 nt, Artificial Sequence
  Synthetic Oligonucleotide
gguuaagacauggaaccuucggucc

SEQ ID NO: 10800 - RNA, 25 nt, Artificial Sequence
  Synthetic Oligonucleotide
gguuaaaacauggaacauucggccc

SEQ ID NO: 10801 - RNA, 25 nt, Artificial Sequence
  Synthetic Oligonucleotide
gguuaaaacauggaacauucggucc

SEQ ID NO: 10802 - RNA, 25 nt, Artificial Sequence
  Synthetic Oligonucleotide
gauuaaaacauggaaccuucggucc

SEQ ID NO: 10803 - RNA, 25 nt, Artificial Sequence
  Synthetic Oligonucleotide
ggcuaaaacauggaaccuucggucc

SEQ ID NO: 10804 - RNA, 25 nt, Artificial Sequence
  Synthetic Oligonucleotide
ggcuaaagcauggaaccuuuggccc

SEQ ID NO: 10805 - RNA, 25 nt, Artificial Sequence
  Synthetic Oligonucleotide
gguuaaagcacggaaccuuuggccc

SEQ ID NO: 10806 - RNA, 25 nt, Artificial Sequence
  Synthetic Oligonucleotide
gauuaaaacacggaaccuuuggccc

SEQ ID NO: 10807 - RNA, 25 nt, Artificial Sequence
  Synthetic Oligonucleotide
gauuaaaacacggaaccuucggccc

SEQ ID NO: 10808 - RNA, 25 nt, Artificial Sequence
  Synthetic Oligonucleotide
gguuaaaacacggaacauucggucc

SEQ ID NO: 10809 - RNA, 25 nt, Artificial Sequence
  Synthetic Oligonucleotide
gguuaaagcaugggacuuuuggucc

SEQ ID NO: 10810 - RNA, 25 nt, Artificial Sequence
  Synthetic Oligonucleotide
gauuaaaacacgggaccuuuggccc

SEQ ID NO: 10811 - RNA, 25 nt, Artificial Sequence
  Synthetic Oligonucleotide
aagguuaaaacauggaaccuuuggu

SEQ ID NO: 10812 - RNA, 25 nt, Artificial Sequence
  Synthetic Oligonucleotide
aagguuaaaacauggaaccuuugga

SEQ ID NO: 10813 - RNA, 25 nt, Artificial Sequence
  Synthetic Oligonucleotide
aagguuaaaacauggaaccuuuggg

SEQ ID NO: 10814 - RNA, 25 nt, Artificial Sequence
  Synthetic Oligonucleotide
aagguuaaaacauggaaccuuuagc

SEQ ID NO: 10815 - RNA, 25 nt, Artificial Sequence
  Synthetic Oligonucleotide
aagguuaaaacauggaaccuucggc

SEQ ID NO: 10816 - RNA, 25 nt, Artificial Sequence
  Synthetic Oligonucleotide
aagguuaaaacauggaaccuuwggc

SEQ ID NO: 10817 - RNA, 25 nt, Artificial Sequence
  Synthetic Oligonucleotide
aagguuaaaacauggaaccuucggu

SEQ ID NO: 10818 - RNA, 25 nt, Artificial Sequence
  Synthetic Oligonucleotide
aagguuaaaacaugggaccuuuggc

SEQ ID NO: 10819 - RNA, 25 nt, Artificial Sequence
  Synthetic Oligonucleotide
aagguugaaacauggaaccuuuggc

SEQ ID NO: 10820 - RNA, 25 nt, Artificial Sequence
  Synthetic Oligonucleotide
aagguuaaaacauggaacuuuuggc

SEQ ID NO: 10821 - RNA, 25 nt, Artificial Sequence
  Synthetic Oligonucleotide
aagguuaaagcauggaaccuuuggc

SEQ ID NO: 10822 - RNA, 25 nt, Artificial Sequence
  Synthetic Oligonucleotide
aagguuaaaacaugggaccuuuggu

SEQ ID NO: 10823 - RNA, 25 nt, Artificial Sequence
  Synthetic Oligonucleotide
aagguuaaagcauggaaccuuuggu

SEQ ID NO: 10824 - RNA, 25 nt, Artificial Sequence
  Synthetic Oligonucleotide
aagguuaaaaaauggaaccuuuggc

SEQ ID NO: 10825 - RNA, 25 nt, Artificial Sequence
  Synthetic Oligonucleotide
aagauuaaaacauggaaccuuuggc

SEQ ID NO: 10826 - RNA, 25 nt, Artificial Sequence
  Synthetic Oligonucleotide
aagguuaaaacacggaaccuuuggc

SEQ ID NO: 10827 - RNA, 25 nt, Artificial Sequence
  Synthetic Oligonucleotide
aagguuaaaacaugguaccuuuggc

SEQ ID NO: 10828 - RNA, 25 nt, Artificial Sequence
  Synthetic Oligonucleotide
aagguuaaaacauggaacauuuggc

SEQ ID NO: 10829 - RNA, 25 nt, Artificial Sequence
  Synthetic Oligonucleotide
aagguuaagacauggaaccuucggu

SEQ ID NO: 10830 - RNA, 25 nt, Artificial Sequence
  Synthetic Oligonucleotide
aagguuaaaacauggaacauucggc

SEQ ID NO: 10831 - RNA, 25 nt, Artificial Sequence
  Synthetic Oligonucleotide
aagguuaaaacauggaacauucggu

SEQ ID NO: 10832 - RNA, 25 nt, Artificial Sequence
  Synthetic Oligonucleotide
aagauuaaaacauggaaccuucggu

SEQ ID NO: 10833 - RNA, 25 nt, Artificial Sequence
  Synthetic Oligonucleotide
aaggcuaaaacauggaaccuucggu

SEQ ID NO: 10834 - RNA, 25 nt, Artificial Sequence
  Synthetic Oligonucleotide
aaggcuaaagcauggaaccuuuggc

SEQ ID NO: 10835 - RNA, 25 nt, Artificial Sequence
  Synthetic Oligonucleotide
aagguuaaagcacggaaccuuuggc

SEQ ID NO: 10836 - RNA, 25 nt, Artificial Sequence
  Synthetic Oligonucleotide
aagauuaaaacacggaaccuuuggc

SEQ ID NO: 10837 - RNA, 25 nt, Artificial Sequence
  Synthetic Oligonucleotide
aagauuaaaacacggaaccuucggc

SEQ ID NO: 10838 - RNA, 25 nt, Artificial Sequence
  Synthetic Oligonucleotide
aagguuaaaacacggaacauucggu

SEQ ID NO: 10839 - RNA, 25 nt, Artificial Sequence
  Synthetic Oligonucleotide
aagguuaaagcaugggacuuuuggu

SEQ ID NO: 10840 - RNA, 25 nt, Artificial Sequence
  Synthetic Oligonucleotide
aagauuaaaacacgggaccuuuggc

SEQ ID NO: 10841 - RNA, 25 nt, Artificial Sequence
  Synthetic Oligonucleotide
agguuaaaacauggaaccuuugguc

SEQ ID NO: 10842 - RNA, 25 nt, Artificial Sequence
  Synthetic Oligonucleotide
agguuaaaacauggaaccuuuggac

SEQ ID NO: 10843 - RNA, 25 nt, Artificial Sequence
  Synthetic Oligonucleotide
agguuaaaacauggaaccuuugggc

SEQ ID NO: 10844 - RNA, 25 nt, Artificial Sequence
  Synthetic Oligonucleotide
agguuaaaacauggaaccuuuagcc

SEQ ID NO: 10845 - RNA, 25 nt, Artificial Sequence
  Synthetic Oligonucleotide
agguuaaaacauggaaccuucggcc

SEQ ID NO: 10846 - RNA, 25 nt, Artificial Sequence
  Synthetic Oligonucleotide
agguuaaaacauggaaccuuwggcc

SEQ ID NO: 10847 - RNA, 25 nt, Artificial Sequence
  Synthetic Oligonucleotide
agguuaaaacauggaaccuucgguc

SEQ ID NO: 10848 - RNA, 25 nt, Artificial Sequence
  Synthetic Oligonucleotide
agguuaaaacaugggaccuuuggcc

SEQ ID NO: 10849 - RNA, 25 nt, Artificial Sequence
  Synthetic Oligonucleotide
agguugaaacauggaaccuuuggcc

SEQ ID NO: 10850 - RNA, 25 nt, Artificial Sequence
  Synthetic Oligonucleotide
agguuaaaacauggaacuuuuggcc

SEQ ID NO: 10851 - RNA, 25 nt, Artificial Sequence
  Synthetic Oligonucleotide
agguuaaagcauggaaccuuuggcc

SEQ ID NO: 10852 - RNA, 25 nt, Artificial Sequence
  Synthetic Oligonucleotide
agguuaaaacaugggaccuuugguc

SEQ ID NO: 10853 - RNA, 25 nt, Artificial Sequence
  Synthetic Oligonucleotide
agguuaaagcauggaaccuuugguc

SEQ ID NO: 10854 - RNA, 25 nt, Artificial Sequence
  Synthetic Oligonucleotide
agguuaaaaaauggaaccuuuggcc

SEQ ID NO: 10855 - RNA, 25 nt, Artificial Sequence
  Synthetic Oligonucleotide
agauuaaaacauggaaccuuuggcc

SEQ ID NO: 10856 - RNA, 25 nt, Artificial Sequence
  Synthetic Oligonucleotide
agguuaaaacacggaaccuuuggcc

SEQ ID NO: 10857 - RNA, 25 nt, Artificial Sequence
  Synthetic Oligonucleotide
agguuaaaacaugguaccuuuggcc

SEQ ID NO: 10858 - RNA, 25 nt, Artificial Sequence
  Synthetic Oligonucleotide
agguuaaaacauggaacauuuggcc

SEQ ID NO: 10859 - RNA, 25 nt, Artificial Sequence
  Synthetic Oligonucleotide
agguuaagacauggaaccuucgguc

SEQ ID NO: 10860 - RNA, 25 nt, Artificial Sequence
  Synthetic Oligonucleotide
agguuaaaacauggaacauucggcc

SEQ ID NO: 10861 - RNA, 25 nt, Artificial Sequence
  Synthetic Oligonucleotide
agguuaaaacauggaacauucgguc

SEQ ID NO: 10862 - RNA, 25 nt, Artificial Sequence
  Synthetic Oligonucleotide
agauuaaaacauggaaccuucgguc

SEQ ID NO: 10863 - RNA, 25 nt, Artificial Sequence
  Synthetic Oligonucleotide
aggcuaaaacauggaaccuucgguc

SEQ ID NO: 10864 - RNA, 25 nt, Artificial Sequence
  Synthetic Oligonucleotide
aggcuaaagcauggaaccuuuggcc

SEQ ID NO: 10865 - RNA, 25 nt, Artificial Sequence
  Synthetic Oligonucleotide
agguuaaagcacggaaccuuuggcc

SEQ ID NO: 10866 - RNA, 25 nt, Artificial Sequence
  Synthetic Oligonucleotide
agauuaaaacacggaaccuuuggcc

SEQ ID NO: 10867 - RNA, 25 nt, Artificial Sequence
  Synthetic Oligonucleotide
agauuaaaacacggaaccuucggcc

SEQ ID NO: 10868 - RNA, 25 nt, Artificial Sequence
  Synthetic Oligonucleotide
agguuaaaacacggaacauucgguc

SEQ ID NO: 10869 - RNA, 25 nt, Artificial Sequence
  Synthetic Oligonucleotide
agguuaaagcaugggacuuuugguc

SEQ ID NO: 10870 - RNA, 25 nt, Artificial Sequence
  Synthetic Oligonucleotide
agauuaaaacacgggaccuuuggcc

SEQ ID NO: 10871 - RNA, 25 nt, Artificial Sequence
  Synthetic Oligonucleotide
uacuuaggaugaaauggaugauggc

SEQ ID NO: 10872 - RNA, 25 nt, Artificial Sequence
  Synthetic Oligonucleotide
cacuuaggaugaaguggaugauggc

SEQ ID NO: 10873 - RNA, 25 nt, Artificial Sequence
  Synthetic Oligonucleotide
cacuuagggugaaauggaugauggc

SEQ ID NO: 10874 - RNA, 25 nt, Artificial Sequence
  Synthetic Oligonucleotide
cgcuuaggaugaaauggaugauggc

SEQ ID NO: 10875 - RNA, 25 nt, Artificial Sequence
  Synthetic Oligonucleotide
cacuuagaaugaaauggaugauggc

SEQ ID NO: 10876 - RNA, 25 nt, Artificial Sequence
  Synthetic Oligonucleotide
cacucaggaugaaauggaugauggc

SEQ ID NO: 10877 - RNA, 25 nt, Artificial Sequence
  Synthetic Oligonucleotide
cccuuaggaugaaauggaugauggc

SEQ ID NO: 10878 - RNA, 25 nt, Artificial Sequence
  Synthetic Oligonucleotide
cucuuaggaugaaauggaugauggc

SEQ ID NO: 10879 - RNA, 25 nt, Artificial Sequence
  Synthetic Oligonucleotide
caauuaggaugaaauggaugauggc

SEQ ID NO: 10880 - RNA, 25 nt, Artificial Sequence
  Synthetic Oligonucleotide
cucuuagaaugaaauggaugauggc

SEQ ID NO: 10881 - RNA, 25 nt, Artificial Sequence
  Synthetic Oligonucleotide
cacucagaaugaaguggaugauggc

SEQ ID NO: 10882 - RNA, 25 nt, Artificial Sequence
  Synthetic Oligonucleotide
cucucagaaugaaauggaugauggc

SEQ ID NO: 10883 - RNA, 25 nt, Artificial Sequence
  Synthetic Oligonucleotide
cccucagaaugaaauggaugauggc

SEQ ID NO: 10884 - RNA, 25 nt, Artificial Sequence
  Synthetic Oligonucleotide
uuacuuaggaugaaauggaugaugg

SEQ ID NO: 10885 - RNA, 25 nt, Artificial Sequence
  Synthetic Oligonucleotide
ucacuuaggaugaaguggaugaugg

SEQ ID NO: 10886 - RNA, 25 nt, Artificial Sequence
  Synthetic Oligonucleotide
ucacuuagggugaaauggaugaugg

SEQ ID NO: 10887 - RNA, 25 nt, Artificial Sequence
  Synthetic Oligonucleotide
ucgcuuaggaugaaauggaugaugg

SEQ ID NO: 10888 - RNA, 25 nt, Artificial Sequence
  Synthetic Oligonucleotide
ucacuuagaaugaaauggaugaugg

SEQ ID NO: 10889 - RNA, 25 nt, Artificial Sequence
  Synthetic Oligonucleotide
gcacuuaggaugaaauggaugaugg

SEQ ID NO: 10890 - RNA, 25 nt, Artificial Sequence
  Synthetic Oligonucleotide
ucacucaggaugaaauggaugaugg

SEQ ID NO: 10891 - RNA, 25 nt, Artificial Sequence
  Synthetic Oligonucleotide
ucccuuaggaugaaauggaugaugg

SEQ ID NO: 10892 - RNA, 25 nt, Artificial Sequence
  Synthetic Oligonucleotide
ucucuuaggaugaaauggaugaugg

SEQ ID NO: 10893 - RNA, 25 nt, Artificial Sequence
  Synthetic Oligonucleotide
ucaauuaggaugaaauggaugaugg

SEQ ID NO: 10894 - RNA, 25 nt, Artificial Sequence
  Synthetic Oligonucleotide
gcucuuagaaugaaauggaugaugg

SEQ ID NO: 10895 - RNA, 25 nt, Artificial Sequence
  Synthetic Oligonucleotide
aagaauucggauggccaucaauuag

SEQ ID NO: 10896 - RNA, 25 nt, Artificial Sequence
  Synthetic Oligonucleotide
aagaauucggauggccaucaauuau

SEQ ID NO: 10897 - RNA, 25 nt, Artificial Sequence
  Synthetic Oligonucleotide
aagaauucggauggccaucauuuaa

SEQ ID NO: 10898 - RNA, 25 nt, Artificial Sequence
  Synthetic Oligonucleotide
aagaauucggauggccaucaacuaa

SEQ ID NO: 10899 - RNA, 25 nt, Artificial Sequence
  Synthetic Oligonucleotide
aagaauucggauggccaucaauuua

SEQ ID NO: 10900 - RNA, 25 nt, Artificial Sequence
  Synthetic Oligonucleotide
aagaauucggauggccaucaaucaa

SEQ ID NO: 10901 - RNA, 25 nt, Artificial Sequence
  Synthetic Oligonucleotide
aagaauucggauggccaucaaguaa

SEQ ID NO: 10902 - RNA, 25 nt, Artificial Sequence
  Synthetic Oligonucleotide
aagaauucggauggccaucaauagg

SEQ ID NO: 10903 - RNA, 25 nt, Artificial Sequence
  Synthetic Oligonucleotide
aagaauucggauggccauuaauuaa

SEQ ID NO: 10904 - RNA, 25 nt, Artificial Sequence
  Synthetic Oligonucleotide
aaggauucggauggccaucaauuaa

SEQ ID NO: 10905 - RNA, 25 nt, Artificial Sequence
  Synthetic Oligonucleotide
aagaguucggauggccaucaauuaa

SEQ ID NO: 10906 - RNA, 25 nt, Artificial Sequence
  Synthetic Oligonucleotide
aggaauucggauggccaucaauuaa

SEQ ID NO: 10907 - RNA, 25 nt, Artificial Sequence
  Synthetic Oligonucleotide
aaggauucggauggccaucaauuag

SEQ ID NO: 10908 - RNA, 25 nt, Artificial Sequence
  Synthetic Oligonucleotide
aagaauucgaauggccaucaauuaa

SEQ ID NO: 10909 - RNA, 25 nt, Artificial Sequence
  Synthetic Oligonucleotide
aagauuucggauggccaucaauuaa

SEQ ID NO: 10910 - RNA, 25 nt, Artificial Sequence
  Synthetic Oligonucleotide
aagaauuccgauggccaucaauuag

SEQ ID NO: 10911 - RNA, 25 nt, Artificial Sequence
  Synthetic Oligonucleotide
aagaauucggauggccaccaaugag

SEQ ID NO: 10912 - RNA, 25 nt, Artificial Sequence
  Synthetic Oligonucleotide
aaggauucgaauggccaucaauuaa

SEQ ID NO: 10913 - RNA, 25 nt, Artificial Sequence
  Synthetic Oligonucleotide
aagaauucgaauggccuucaauuaa

SEQ ID NO: 10914 - RNA, 25 nt, Artificial Sequence
  Synthetic Oligonucleotide
aagaagucggacugccaucaauuaa

SEQ ID NO: 10915 - RNA, 25 nt, Artificial Sequence
  Synthetic Oligonucleotide
aggaugaaauggaugauggcgauga

SEQ ID NO: 10916 - RNA, 25 nt, Artificial Sequence
  Synthetic Oligonucleotide
aggaugaaauggaugauggccauga

SEQ ID NO: 10917 - RNA, 25 nt, Artificial Sequence
  Synthetic Oligonucleotide
aggaugaaauggaugauggcuauga

SEQ ID NO: 10918 - RNA, 25 nt, Artificial Sequence
  Synthetic Oligonucleotide
aggaugaaguggaugauggcaauga

SEQ ID NO: 10919 - RNA, 25 nt, Artificial Sequence
  Synthetic Oligonucleotide
agggugaaauggaugauggcaauga

SEQ ID NO: 10920 - RNA, 25 nt, Artificial Sequence
  Synthetic Oligonucleotide
agaaugaaauggaugauggcaauga

SEQ ID NO: 10921 - RNA, 25 nt, Artificial Sequence
  Synthetic Oligonucleotide
agaaugaaauggaugauggcgauga

SEQ ID NO: 10922 - RNA, 25 nt, Artificial Sequence
  Synthetic Oligonucleotide
agaaugaaauggaugauggccauga

SEQ ID NO: 10923 - RNA, 25 nt, Artificial Sequence
  Synthetic Oligonucleotide
agaaugaaguggaugauggcaauga

SEQ ID NO: 10924 - RNA, 25 nt, Artificial Sequence
  Synthetic Oligonucleotide
ggaugaaauggaugauggcgaugaa

SEQ ID NO: 10925 - RNA, 25 nt, Artificial Sequence
  Synthetic Oligonucleotide
ggaugaaauggaugauggcaaugag

SEQ ID NO: 10926 - RNA, 25 nt, Artificial Sequence
  Synthetic Oligonucleotide
ggaugaaauggaugauggccaugaa

SEQ ID NO: 10927 - RNA, 25 nt, Artificial Sequence
  Synthetic Oligonucleotide
ggaugaaauggaugauggcuaugaa

SEQ ID NO: 10928 - RNA, 25 nt, Artificial Sequence
  Synthetic Oligonucleotide
ggaugaaguggaugauggcaaugaa

SEQ ID NO: 10929 - RNA, 25 nt, Artificial Sequence
  Synthetic Oligonucleotide
gggugaaauggaugauggcaaugaa

SEQ ID NO: 10930 - RNA, 25 nt, Artificial Sequence
  Synthetic Oligonucleotide
gaaugaaauggaugauggcaaugaa

SEQ ID NO: 10931 - RNA, 25 nt, Artificial Sequence
  Synthetic Oligonucleotide
gaaugaaauggaugauggcgaugaa

SEQ ID NO: 10932 - RNA, 25 nt, Artificial Sequence
  Synthetic Oligonucleotide
gaaugaaauggaugauggccaugaa

SEQ ID NO: 10933 - RNA, 25 nt, Artificial Sequence
  Synthetic Oligonucleotide
gaaugaaguggaugauggcaaugaa

SEQ ID NO: 10934 - RNA, 25 nt, Artificial Sequence
  Synthetic Oligonucleotide
gaugaaauggaugauggcaaugaga

SEQ ID NO: 10935 - RNA, 25 nt, Artificial Sequence
  Synthetic Oligonucleotide
gaugaaauggaugauggcgaugaaa

SEQ ID NO: 10936 - RNA, 25 nt, Artificial Sequence
  Synthetic Oligonucleotide
gaugaaguggaugauggcaaugaaa

SEQ ID NO: 10937 - RNA, 25 nt, Artificial Sequence
  Synthetic Oligonucleotide
ggugaaauggaugauggcaaugaaa

SEQ ID NO: 10938 - RNA, 25 nt, Artificial Sequence
  Synthetic Oligonucleotide
aaugaaauggaugauggcaaugaaa

SEQ ID NO: 10939 - RNA, 25 nt, Artificial Sequence
  Synthetic Oligonucleotide
gaugaaauggaugauggccaugaaa

SEQ ID NO: 10940 - RNA, 25 nt, Artificial Sequence
  Synthetic Oligonucleotide
gaugaaauggaugauggcuaugaaa

SEQ ID NO: 10941 - RNA, 25 nt, Artificial Sequence
  Synthetic Oligonucleotide
aaugaaauggaugauggcgaugaaa

SEQ ID NO: 10942 - RNA, 25 nt, Artificial Sequence
  Synthetic Oligonucleotide
aaugaaguggaugauggcaaugaaa

SEQ ID NO: 10943 - RNA, 25 nt, Artificial Sequence
  Synthetic Oligonucleotide
aaugaaauggaugauggccaugaaa

SEQ ID NO: 10944 - RNA, 25 nt, Artificial Sequence
  Synthetic Oligonucleotide
uuaggaugaaauggaugauggcgau

SEQ ID NO: 10945 - RNA, 25 nt, Artificial Sequence
  Synthetic Oligonucleotide
uuaggaugaaauggaugauggccau

SEQ ID NO: 10946 - RNA, 25 nt, Artificial Sequence
  Synthetic Oligonucleotide
uuaggaugaaauggaugauggcuau

SEQ ID NO: 10947 - RNA, 25 nt, Artificial Sequence
  Synthetic Oligonucleotide
uuaggaugaaguggaugauggcaau

SEQ ID NO: 10948 - RNA, 25 nt, Artificial Sequence
  Synthetic Oligonucleotide
uuagggugaaauggaugauggcaau

SEQ ID NO: 10949 - RNA, 25 nt, Artificial Sequence
  Synthetic Oligonucleotide
uuagaaugaaauggaugauggcaau

SEQ ID NO: 10950 - RNA, 25 nt, Artificial Sequence
  Synthetic Oligonucleotide
ucaggaugaaauggaugauggcaau

SEQ ID NO: 10951 - RNA, 25 nt, Artificial Sequence
  Synthetic Oligonucleotide
uuagaaugaaauggaugauggcgau

SEQ ID NO: 10952 - RNA, 25 nt, Artificial Sequence
  Synthetic Oligonucleotide
ucagaaugaaauggaugauggcaau

SEQ ID NO: 10953 - RNA, 25 nt, Artificial Sequence
  Synthetic Oligonucleotide
ucagaaugaaauggaugauggccau

SEQ ID NO: 10954 - RNA, 25 nt, Artificial Sequence
  Synthetic Oligonucleotide
ucagaaugaaguggaugauggcaau

SEQ ID NO: 10955 - RNA, 25 nt, Artificial Sequence
  Synthetic Oligonucleotide
uaggaugaaauggaugauggcgaug

SEQ ID NO: 10956 - RNA, 25 nt, Artificial Sequence
  Synthetic Oligonucleotide
uaggaugaaauggaugauggccaug

SEQ ID NO: 10957 - RNA, 25 nt, Artificial Sequence
  Synthetic Oligonucleotide
uaggaugaaauggaugauggcuaug

SEQ ID NO: 10958 - RNA, 25 nt, Artificial Sequence
  Synthetic Oligonucleotide
uaggaugaaguggaugauggcaaug

SEQ ID NO: 10959 - RNA, 25 nt, Artificial Sequence
  Synthetic Oligonucleotide
uagggugaaauggaugauggcaaug

SEQ ID NO: 10960 - RNA, 25 nt, Artificial Sequence
  Synthetic Oligonucleotide
uagaaugaaauggaugauggcaaug

SEQ ID NO: 10961 - RNA, 25 nt, Artificial Sequence
  Synthetic Oligonucleotide
caggaugaaauggaugauggcaaug

SEQ ID NO: 10962 - RNA, 25 nt, Artificial Sequence
  Synthetic Oligonucleotide
uagaaugaaauggaugauggcgaug

SEQ ID NO: 10963 - RNA, 25 nt, Artificial Sequence
  Synthetic Oligonucleotide
cagaaugaaauggaugauggcaaug

SEQ ID NO: 10964 - RNA, 25 nt, Artificial Sequence
  Synthetic Oligonucleotide
cagaaugaaauggaugauggccaug

SEQ ID NO: 10965 - RNA, 25 nt, Artificial Sequence
  Synthetic Oligonucleotide
cagaaugaaguggaugauggcaaug

SEQ ID NO: 10966 - RNA, 25 nt, Artificial Sequence
  Synthetic Oligonucleotide
cuuaggaugaaauggaugauggcga

SEQ ID NO: 10967 - RNA, 25 nt, Artificial Sequence
  Synthetic Oligonucleotide
cuuaggaugaaauggaugauggcca

SEQ ID NO: 10968 - RNA, 25 nt, Artificial Sequence
  Synthetic Oligonucleotide
cuuaggaugaaauggaugauggcua

SEQ ID NO: 10969 - RNA, 25 nt, Artificial Sequence
  Synthetic Oligonucleotide
cuuaggaugaaguggaugauggcaa

SEQ ID NO: 10970 - RNA, 25 nt, Artificial Sequence
  Synthetic Oligonucleotide
cuuagggugaaauggaugauggcaa

SEQ ID NO: 10971 - RNA, 25 nt, Artificial Sequence
  Synthetic Oligonucleotide
cuuagaaugaaauggaugauggcaa

SEQ ID NO: 10972 - RNA, 25 nt, Artificial Sequence
  Synthetic Oligonucleotide
cucaggaugaaauggaugauggcaa

SEQ ID NO: 10973 - RNA, 25 nt, Artificial Sequence
  Synthetic Oligonucleotide
auuaggaugaaauggaugauggcaa

SEQ ID NO: 10974 - RNA, 25 nt, Artificial Sequence
  Synthetic Oligonucleotide
cuuagaaugaaauggaugauggcga

SEQ ID NO: 10975 - RNA, 25 nt, Artificial Sequence
  Synthetic Oligonucleotide
cucagaaugaaauggaugauggcaa

SEQ ID NO: 10976 - RNA, 25 nt, Artificial Sequence
  Synthetic Oligonucleotide
cucagaaugaaauggaugauggcca

SEQ ID NO: 10977 - RNA, 25 nt, Artificial Sequence
  Synthetic Oligonucleotide
cucagaaugaaguggaugauggcaa

SEQ ID NO: 10978 - RNA, 25 nt, Artificial Sequence
  Synthetic Oligonucleotide
guaaugaaacgaaaacgggacucca

SEQ ID NO: 10979 - RNA, 25 nt, Artificial Sequence
  Synthetic Oligonucleotide
guaaugaaacgaaaacgggacuaua

SEQ ID NO: 10980 - RNA, 25 nt, Artificial Sequence
  Synthetic Oligonucleotide
gugaugaaacgaaaacgggacucua

SEQ ID NO: 10981 - RNA, 25 nt, Artificial Sequence
  Synthetic Oligonucleotide
guaaugaaacggaaacgggacucua

SEQ ID NO: 10982 - RNA, 25 nt, Artificial Sequence
  Synthetic Oligonucleotide
guaaugaaacgaaaaugggacucua

SEQ ID NO: 10983 - RNA, 25 nt, Artificial Sequence
  Synthetic Oligonucleotide
guaaugaaacggaaacgggacuuua

SEQ ID NO: 10984 - RNA, 25 nt, Artificial Sequence
  Synthetic Oligonucleotide
guaaugaaacgaaaacgagacucua

SEQ ID NO: 10985 - RNA, 25 nt, Artificial Sequence
  Synthetic Oligonucleotide
guaaugaaacgaaaacggaacucua

SEQ ID NO: 10986 - RNA, 25 nt, Artificial Sequence
  Synthetic Oligonucleotide
guaaugaaacgaaaaagggacucua

SEQ ID NO: 10987 - RNA, 25 nt, Artificial Sequence
  Synthetic Oligonucleotide
gugaugaaacggaaacgggacucua

SEQ ID NO: 10988 - RNA, 25 nt, Artificial Sequence
  Synthetic Oligonucleotide
guaaugaaacggaaacgagacucua

SEQ ID NO: 10989 - RNA, 25 nt, Artificial Sequence
  Synthetic Oligonucleotide
guaaugaaacggaaacggaacucua

SEQ ID NO: 10990 - RNA, 25 nt, Artificial Sequence
  Synthetic Oligonucleotide
gugaugaaacgaaaacggaacucua

SEQ ID NO: 10991 - RNA, 25 nt, Artificial Sequence
  Synthetic Oligonucleotide
guaaugaaacggaaacgaaacucua

SEQ ID NO: 10992 - RNA, 25 nt, Artificial Sequence
  Synthetic Oligonucleotide
guaaugaaacggaaaagagacucua

SEQ ID NO: 10993 - RNA, 25 nt, Artificial Sequence
  Synthetic Oligonucleotide
acuuaggaugaaauggaugauggcg

SEQ ID NO: 10994 - RNA, 25 nt, Artificial Sequence
  Synthetic Oligonucleotide
acuuaggaugaaauggaugauggcc

SEQ ID NO: 10995 - RNA, 25 nt, Artificial Sequence
  Synthetic Oligonucleotide
acuuaggaugaaauggaugauggcu

SEQ ID NO: 10996 - RNA, 25 nt, Artificial Sequence
  Synthetic Oligonucleotide
acuuaggaugaaguggaugauggca

SEQ ID NO: 10997 - RNA, 25 nt, Artificial Sequence
  Synthetic Oligonucleotide
acuuagggugaaauggaugauggca

SEQ ID NO: 10998 - RNA, 25 nt, Artificial Sequence
  Synthetic Oligonucleotide
gcuuaggaugaaauggaugauggca

SEQ ID NO: 10999 - RNA, 25 nt, Artificial Sequence
  Synthetic Oligonucleotide
acuuagaaugaaauggaugauggca

SEQ ID NO: 11000 - RNA, 25 nt, Artificial Sequence
  Synthetic Oligonucleotide
acucaggaugaaauggaugauggca

SEQ ID NO: 11001 - RNA, 25 nt, Artificial Sequence
  Synthetic Oligonucleotide
ccuuaggaugaaauggaugauggca

SEQ ID NO: 11002 - RNA, 25 nt, Artificial Sequence
  Synthetic Oligonucleotide
ucuuaggaugaaauggaugauggca

SEQ ID NO: 11003 - RNA, 25 nt, Artificial Sequence
  Synthetic Oligonucleotide
aauuaggaugaaauggaugauggca

SEQ ID NO: 11004 - RNA, 25 nt, Artificial Sequence
  Synthetic Oligonucleotide
ucuuagaaugaaauggaugauggcg

SEQ ID NO: 11005 - RNA, 25 nt, Artificial Sequence
  Synthetic Oligonucleotide
acucagaaugaaguggaugauggca

SEQ ID NO: 11006 - RNA, 25 nt, Artificial Sequence
  Synthetic Oligonucleotide
ucucagaaugaaauggaugauggca

SEQ ID NO: 11007 - RNA, 25 nt, Artificial Sequence
  Synthetic Oligonucleotide
ccucagaaugaaauggaugauggca

SEQ ID NO: 11008 - RNA, 25 nt, Artificial Sequence
  Synthetic Oligonucleotide
ucucagaaugaaauggaugauggcc

SEQ ID NO: 11009 - RNA, 25 nt, Artificial Sequence
  Synthetic Oligonucleotide
uaaugaaacgaaaacgggacuccag

SEQ ID NO: 11010 - RNA, 25 nt, Artificial Sequence
  Synthetic Oligonucleotide
uaaugaaacgaaaacgggacucuaa

SEQ ID NO: 11011 - RNA, 25 nt, Artificial Sequence
  Synthetic Oligonucleotide
uaaugaaacgaaaacgggacuauag

SEQ ID NO: 11012 - RNA, 25 nt, Artificial Sequence
  Synthetic Oligonucleotide
ugaugaaacgaaaacgggacucuag

SEQ ID NO: 11013 - RNA, 25 nt, Artificial Sequence
  Synthetic Oligonucleotide
uaaugaaacggaaacgggacucuag

SEQ ID NO: 11014 - RNA, 25 nt, Artificial Sequence
  Synthetic Oligonucleotide
uaaugaaacgaaaaugggacucuag

SEQ ID NO: 11015 - RNA, 25 nt, Artificial Sequence
  Synthetic Oligonucleotide
uaaugaaacggaaacgggacuuuag

SEQ ID NO: 11016 - RNA, 25 nt, Artificial Sequence
  Synthetic Oligonucleotide
uaaugaaacgaaaacgagacucuag

SEQ ID NO: 11017 - RNA, 25 nt, Artificial Sequence
  Synthetic Oligonucleotide
uaaugaaacgaaaacggaacucuag

SEQ ID NO: 11018 - RNA, 25 nt, Artificial Sequence
  Synthetic Oligonucleotide
uaaugaaacgaaaaagggacucuag

SEQ ID NO: 11019 - RNA, 25 nt, Artificial Sequence
  Synthetic Oligonucleotide
ugaugaaacggaaacgggacucuag

SEQ ID NO: 11020 - RNA, 25 nt, Artificial Sequence
  Synthetic Oligonucleotide
uaaugaaacggaaacgagacucuag

SEQ ID NO: 11021 - RNA, 25 nt, Artificial Sequence
  Synthetic Oligonucleotide
uaaugaaacggaaacggaacucuag

SEQ ID NO: 11022 - RNA, 25 nt, Artificial Sequence
  Synthetic Oligonucleotide
ugaugaaacgaaaacggaacucuag

SEQ ID NO: 11023 - RNA, 25 nt, Artificial Sequence
  Synthetic Oligonucleotide
uaaugaaacggaaacgaaacucuag

SEQ ID NO: 11024 - RNA, 25 nt, Artificial Sequence
  Synthetic Oligonucleotide
uaaugaaacggaaaagagacucuag

SEQ ID NO: 11025 - RNA, 25 nt, Artificial Sequence
  Synthetic Oligonucleotide
aaugaaacgaaaacgggacuccagc

SEQ ID NO: 11026 - RNA, 25 nt, Artificial Sequence
  Synthetic Oligonucleotide
aaugaaacgaaaacgggacucuaac

SEQ ID NO: 11027 - RNA, 25 nt, Artificial Sequence
  Synthetic Oligonucleotide
aaugaaacgaaaacgggacuauagc

SEQ ID NO: 11028 - RNA, 25 nt, Artificial Sequence
  Synthetic Oligonucleotide
gaugaaacgaaaacgggacucuagc

SEQ ID NO: 11029 - RNA, 25 nt, Artificial Sequence
  Synthetic Oligonucleotide
aaugaaacggaaacgggacucuagc

SEQ ID NO: 11030 - RNA, 25 nt, Artificial Sequence
  Synthetic Oligonucleotide
aaugaaacgaaaaugggacucuagc

SEQ ID NO: 11031 - RNA, 25 nt, Artificial Sequence
  Synthetic Oligonucleotide
aaugaaacggaaacgggacuuuagc

SEQ ID NO: 11032 - RNA, 25 nt, Artificial Sequence
  Synthetic Oligonucleotide
aaugaaacgaaaacgagacucuagc

SEQ ID NO: 11033 - RNA, 25 nt, Artificial Sequence
  Synthetic Oligonucleotide
aaugaaacgaaaacggaacucuagc

SEQ ID NO: 11034 - RNA, 25 nt, Artificial Sequence
  Synthetic Oligonucleotide
aaugaaacgaaaaagggacucuagc

SEQ ID NO: 11035 - RNA, 25 nt, Artificial Sequence
  Synthetic Oligonucleotide
gaugaaacggaaacgggacucuagc

SEQ ID NO: 11036 - RNA, 25 nt, Artificial Sequence
  Synthetic Oligonucleotide
aaugaaacggaaacgagacucuagc

SEQ ID NO: 11037 - RNA, 25 nt, Artificial Sequence
  Synthetic Oligonucleotide
aaugaaacggaaacggaacucuagc

SEQ ID NO: 11038 - RNA, 25 nt, Artificial Sequence
  Synthetic Oligonucleotide
gaugaaacgaaaacggaacucuagc

SEQ ID NO: 11039 - RNA, 25 nt, Artificial Sequence
  Synthetic Oligonucleotide
aaugaaacggaaacgaaacucuagc

SEQ ID NO: 11040 - RNA, 25 nt, Artificial Sequence
  Synthetic Oligonucleotide
aaugaaacggaaaagagacucuagc

SEQ ID NO: 11041 - RNA, 25 nt, Artificial Sequence
  Synthetic Oligonucleotide
uuaaaacauggaaccuuugguccug

SEQ ID NO: 11042 - RNA, 25 nt, Artificial Sequence
  Synthetic Oligonucleotide
uuaaaacauggaaccuuuggccccg

SEQ ID NO: 11043 - RNA, 25 nt, Artificial Sequence
  Synthetic Oligonucleotide
uuaaaacauggaaccuuuggcccag

SEQ ID NO: 11044 - RNA, 25 nt, Artificial Sequence
  Synthetic Oligonucleotide
uuaaaacauggaaccuuuggcccgg

SEQ ID NO: 11045 - RNA, 25 nt, Artificial Sequence
  Synthetic Oligonucleotide
uuaaaacauggaaccuuuggaccug

SEQ ID NO: 11046 - RNA, 25 nt, Artificial Sequence
  Synthetic Oligonucleotide
uuaaaacauggaaccuuugggccug

SEQ ID NO: 11047 - RNA, 25 nt, Artificial Sequence
  Synthetic Oligonucleotide
uuaaaacauggaaccuuuggucccg

SEQ ID NO: 11048 - RNA, 25 nt, Artificial Sequence
  Synthetic Oligonucleotide
uuaaaacaugggaccuuuggcccug

SEQ ID NO: 11049 - RNA, 25 nt, Artificial Sequence
  Synthetic Oligonucleotide
uugaaacauggaaccuuuggcccug

SEQ ID NO: 11050 - RNA, 25 nt, Artificial Sequence
  Synthetic Oligonucleotide
uuaaaacauggaacuuuuggcccug

SEQ ID NO: 11051 - RNA, 25 nt, Artificial Sequence
  Synthetic Oligonucleotide
uuaaagcauggaaccuuuggcccug

SEQ ID NO: 11052 - RNA, 25 nt, Artificial Sequence
  Synthetic Oligonucleotide
uuaaaacaugggaccuuugguccug

SEQ ID NO: 11053 - RNA, 25 nt, Artificial Sequence
  Synthetic Oligonucleotide
uuaaaacacggaaccuuuggcccug

SEQ ID NO: 11054 - RNA, 25 nt, Artificial Sequence
  Synthetic Oligonucleotide
uuaaaaaauggaaccuuuggcccug

SEQ ID NO: 11055 - RNA, 25 nt, Artificial Sequence
  Synthetic Oligonucleotide
uuaaaacaugguaccuuuggcccug

SEQ ID NO: 11056 - RNA, 25 nt, Artificial Sequence
  Synthetic Oligonucleotide
uuaaaacauggaaccuuuagcccug

SEQ ID NO: 11057 - RNA, 25 nt, Artificial Sequence
  Synthetic Oligonucleotide
uuaaaacauggaaccuucggcccug

SEQ ID NO: 11058 - RNA, 25 nt, Artificial Sequence
  Synthetic Oligonucleotide
uuaaaacauggaaccuuwggcccug

SEQ ID NO: 11059 - RNA, 25 nt, Artificial Sequence
  Synthetic Oligonucleotide
uuaaaacauggaacauuuggcccug

SEQ ID NO: 11060 - RNA, 25 nt, Artificial Sequence
  Synthetic Oligonucleotide
uuaaagcauggaaccuuuggucccg

SEQ ID NO: 11061 - RNA, 25 nt, Artificial Sequence
  Synthetic Oligonucleotide
uuaaaacauggaaccuucggucccg

SEQ ID NO: 11062 - RNA, 25 nt, Artificial Sequence
  Synthetic Oligonucleotide
cuaaagcauggaaccuuuggcccug

SEQ ID NO: 11063 - RNA, 25 nt, Artificial Sequence
  Synthetic Oligonucleotide
uuaaaacacgggaccuuuggcccug

SEQ ID NO: 11064 - RNA, 25 nt, Artificial Sequence
  Synthetic Oligonucleotide
uuaaagcacggaaccuuuggcccug

SEQ ID NO: 11065 - RNA, 25 nt, Artificial Sequence
  Synthetic Oligonucleotide
uuaaaacacggaaccuucggcccug

SEQ ID NO: 11066 - RNA, 25 nt, Artificial Sequence
  Synthetic Oligonucleotide
uuaaaacauggaacauucgguccug

SEQ ID NO: 11067 - RNA, 25 nt, Artificial Sequence
  Synthetic Oligonucleotide
uuaagacauggaaccuucggucccg

SEQ ID NO: 11068 - RNA, 25 nt, Artificial Sequence
  Synthetic Oligonucleotide
uuaaaacauggaacauucggccccg

SEQ ID NO: 11069 - RNA, 25 nt, Artificial Sequence
  Synthetic Oligonucleotide
uuaaaacauggaacauucggucccg

SEQ ID NO: 11070 - RNA, 25 nt, Artificial Sequence
  Synthetic Oligonucleotide
cuaaaacauggaaccuucggucccg

SEQ ID NO: 11071 - RNA, 25 nt, Artificial Sequence
  Synthetic Oligonucleotide
uuaaagcaugggacuuuugguccug

SEQ ID NO: 11072 - RNA, 25 nt, Artificial Sequence
  Synthetic Oligonucleotide
uugaaacacgggaccuuuggcccug

SEQ ID NO: 11073 - RNA, 25 nt, Artificial Sequence
  Synthetic Oligonucleotide
uuaaaacacggaacauucggucccg

SEQ ID NO: 11074 - RNA, 25 nt, Artificial Sequence
  Synthetic Oligonucleotide
uaaaacauggaaccuuugguccugu

SEQ ID NO: 11075 - RNA, 25 nt, Artificial Sequence
  Synthetic Oligonucleotide
uaaaacauggaaccuuuggccccgu

SEQ ID NO: 11076 - RNA, 25 nt, Artificial Sequence
  Synthetic Oligonucleotide
uaaaacauggaaccuuuggcccagu

SEQ ID NO: 11077 - RNA, 25 nt, Artificial Sequence
  Synthetic Oligonucleotide
uaaaacauggaaccuuuggcccggu

SEQ ID NO: 11078 - RNA, 25 nt, Artificial Sequence
  Synthetic Oligonucleotide
uaaaacauggaaccuuuggaccugu

SEQ ID NO: 11079 - RNA, 25 nt, Artificial Sequence
  Synthetic Oligonucleotide
uaaaacauggaaccuuugggccugu

SEQ ID NO: 11080 - RNA, 25 nt, Artificial Sequence
  Synthetic Oligonucleotide
uaaaacauggaaccuuuggucccgu

SEQ ID NO: 11081 - RNA, 25 nt, Artificial Sequence
  Synthetic Oligonucleotide
uaaaacaugggaccuuuggcccugu

SEQ ID NO: 11082 - RNA, 25 nt, Artificial Sequence
  Synthetic Oligonucleotide
uaaagcauggaaccuuuggcccugu

SEQ ID NO: 11083 - RNA, 25 nt, Artificial Sequence
  Synthetic Oligonucleotide
ugaaacauggaaccuuuggcccugu

SEQ ID NO: 11084 - RNA, 25 nt, Artificial Sequence
  Synthetic Oligonucleotide
uaaaacauggaacuuuuggcccugu

SEQ ID NO: 11085 - RNA, 25 nt, Artificial Sequence
  Synthetic Oligonucleotide
uaaaacaugggaccuuugguccugu

SEQ ID NO: 11086 - RNA, 25 nt, Artificial Sequence
  Synthetic Oligonucleotide
uaaaacacggaaccuuuggcccugu

SEQ ID NO: 11087 - RNA, 25 nt, Artificial Sequence
  Synthetic Oligonucleotide
uaaaaaauggaaccuuuggcccugu

SEQ ID NO: 11088 - RNA, 25 nt, Artificial Sequence
  Synthetic Oligonucleotide
uaaaacaugguaccuuuggcccugu

SEQ ID NO: 11089 - RNA, 25 nt, Artificial Sequence
  Synthetic Oligonucleotide
uaaaacauggaaccuuuagcccugu

SEQ ID NO: 11090 - RNA, 25 nt, Artificial Sequence
  Synthetic Oligonucleotide
uaaaacauggaaccuucggcccugu

SEQ ID NO: 11091 - RNA, 25 nt, Artificial Sequence
  Synthetic Oligonucleotide
uaaaacauggaaccuuwggcccugu

SEQ ID NO: 11092 - RNA, 25 nt, Artificial Sequence
  Synthetic Oligonucleotide
uaaaacauggaacauuuggcccugu

SEQ ID NO: 11093 - RNA, 25 nt, Artificial Sequence
  Synthetic Oligonucleotide
uaaagcauggaaccuuuggucccgu

SEQ ID NO: 11094 - RNA, 25 nt, Artificial Sequence
  Synthetic Oligonucleotide
uaaaacauggaaccuucggucccgu

SEQ ID NO: 11095 - RNA, 25 nt, Artificial Sequence
  Synthetic Oligonucleotide
uaaaacacgggaccuuuggcccugu

SEQ ID NO: 11096 - RNA, 25 nt, Artificial Sequence
  Synthetic Oligonucleotide
uaaagcacggaaccuuuggcccugu

SEQ ID NO: 11097 - RNA, 25 nt, Artificial Sequence
  Synthetic Oligonucleotide
uaaaacacggaaccuucggcccugu

SEQ ID NO: 11098 - RNA, 25 nt, Artificial Sequence
  Synthetic Oligonucleotide
uaaaacauggaacauucgguccugu

SEQ ID NO: 11099 - RNA, 25 nt, Artificial Sequence
  Synthetic Oligonucleotide
uaagacauggaaccuucggucccgu

SEQ ID NO: 11100 - RNA, 25 nt, Artificial Sequence
  Synthetic Oligonucleotide
uaaaacauggaacauucggccccgu

SEQ ID NO: 11101 - RNA, 25 nt, Artificial Sequence
  Synthetic Oligonucleotide
uaaaacauggaacauucggucccgu

SEQ ID NO: 11102 - RNA, 25 nt, Artificial Sequence
  Synthetic Oligonucleotide
uaaagcaugggacuuuugguccugu

SEQ ID NO: 11103 - RNA, 25 nt, Artificial Sequence
  Synthetic Oligonucleotide
ugaaacacgggaccuuuggcccugu

SEQ ID NO: 11104 - RNA, 25 nt, Artificial Sequence
  Synthetic Oligonucleotide
uaaaacacggaacauucggucccgu

SEQ ID NO: 11105 - RNA, 25 nt, Artificial Sequence
  Synthetic Oligonucleotide
guuaaaacauggaaccuuugguccu

SEQ ID NO: 11106 - RNA, 25 nt, Artificial Sequence
  Synthetic Oligonucleotide
guuaaaacauggaaccuuuggcccc

SEQ ID NO: 11107 - RNA, 25 nt, Artificial Sequence
  Synthetic Oligonucleotide
guuaaaacauggaaccuuuggccca

SEQ ID NO: 11108 - RNA, 25 nt, Artificial Sequence
  Synthetic Oligonucleotide
guuaaaacauggaaccuuuggcccg

SEQ ID NO: 11109 - RNA, 25 nt, Artificial Sequence
  Synthetic Oligonucleotide
guuaaaacauggaaccuuuggaccu

SEQ ID NO: 11110 - RNA, 25 nt, Artificial Sequence
  Synthetic Oligonucleotide
guuaaaacauggaaccuuugggccu

SEQ ID NO: 11111 - RNA, 25 nt, Artificial Sequence
  Synthetic Oligonucleotide
guuaaaacauggaaccuuuagcccu

SEQ ID NO: 11112 - RNA, 25 nt, Artificial Sequence
  Synthetic Oligonucleotide
guuaaaacauggaaccuuugguccc

SEQ ID NO: 11113 - RNA, 25 nt, Artificial Sequence
  Synthetic Oligonucleotide
guuaaaacaugggaccuuuggcccu

SEQ ID NO: 11114 - RNA, 25 nt, Artificial Sequence
  Synthetic Oligonucleotide
guugaaacauggaaccuuuggcccu

SEQ ID NO: 11115 - RNA, 25 nt, Artificial Sequence
  Synthetic Oligonucleotide
guuaaaacauggaacuuuuggcccu

SEQ ID NO: 11116 - RNA, 25 nt, Artificial Sequence
  Synthetic Oligonucleotide
guuaaagcauggaaccuuuggcccu

SEQ ID NO: 11117 - RNA, 25 nt, Artificial Sequence
  Synthetic Oligonucleotide
guuaaaacaugggaccuuugguccu

SEQ ID NO: 11118 - RNA, 25 nt, Artificial Sequence
  Synthetic Oligonucleotide
guuaaaaaauggaaccuuuggcccu

SEQ ID NO: 11119 - RNA, 25 nt, Artificial Sequence
  Synthetic Oligonucleotide
auuaaaacauggaaccuuuggcccu

SEQ ID NO: 11120 - RNA, 25 nt, Artificial Sequence
  Synthetic Oligonucleotide
guuaaaacacggaaccuuuggcccu

SEQ ID NO: 11121 - RNA, 25 nt, Artificial Sequence
  Synthetic Oligonucleotide
guuaaaacaugguaccuuuggcccu

SEQ ID NO: 11122 - RNA, 25 nt, Artificial Sequence
  Synthetic Oligonucleotide
guuaaaacauggaaccuucggcccu

SEQ ID NO: 11123 - RNA, 25 nt, Artificial Sequence
  Synthetic Oligonucleotide
guuaaaacauggaaccuuwggcccu

SEQ ID NO: 11124 - RNA, 25 nt, Artificial Sequence
  Synthetic Oligonucleotide
guuaaaacauggaacauuuggcccu

SEQ ID NO: 11125 - RNA, 25 nt, Artificial Sequence
  Synthetic Oligonucleotide
guuaaagcauggaaccuuugguccc

SEQ ID NO: 11126 - RNA, 25 nt, Artificial Sequence
  Synthetic Oligonucleotide
guuaaaacauggaaccuucgguccc

SEQ ID NO: 11127 - RNA, 25 nt, Artificial Sequence
  Synthetic Oligonucleotide
gcuaaagcauggaaccuuuggcccu

SEQ ID NO: 11128 - RNA, 25 nt, Artificial Sequence
  Synthetic Oligonucleotide
guuaaagcacggaaccuuuggcccu

SEQ ID NO: 11129 - RNA, 25 nt, Artificial Sequence
  Synthetic Oligonucleotide
auuaaaacacggaaccuuuggcccu

SEQ ID NO: 11130 - RNA, 25 nt, Artificial Sequence
  Synthetic Oligonucleotide
guuaaaacauggaacauucgguccu

SEQ ID NO: 11131 - RNA, 25 nt, Artificial Sequence
  Synthetic Oligonucleotide
guuaagacauggaaccuucgguccc

SEQ ID NO: 11132 - RNA, 25 nt, Artificial Sequence
  Synthetic Oligonucleotide
guuaaaacauggaacauucggcccc

SEQ ID NO: 11133 - RNA, 25 nt, Artificial Sequence
  Synthetic Oligonucleotide
guuaaaacauggaacauucgguccc

SEQ ID NO: 11134 - RNA, 25 nt, Artificial Sequence
  Synthetic Oligonucleotide
auuaaaacauggaaccuucgguccc

SEQ ID NO: 11135 - RNA, 25 nt, Artificial Sequence
  Synthetic Oligonucleotide
gcuaaaacauggaaccuucgguccc

SEQ ID NO: 11136 - RNA, 25 nt, Artificial Sequence
  Synthetic Oligonucleotide
guuaaagcaugggacuuuugguccu

SEQ ID NO: 11137 - RNA, 25 nt, Artificial Sequence
  Synthetic Oligonucleotide
auuaaaacacgggaccuuuggcccu

SEQ ID NO: 11138 - RNA, 25 nt, Artificial Sequence
  Synthetic Oligonucleotide
auuaaaacacggaaccuucggcccu

SEQ ID NO: 11139 - RNA, 25 nt, Artificial Sequence
  Synthetic Oligonucleotide
guuaaaacacggaacauucgguccc

SEQ ID NO: 11140 - RNA, 25 nt, Artificial Sequence
  Synthetic Oligonucleotide
aagaacaagcuguggauauauguaa

SEQ ID NO: 11141 - RNA, 25 nt, Artificial Sequence
  Synthetic Oligonucleotide
aagaacaagcuguggauauuugcaa

SEQ ID NO: 11142 - RNA, 25 nt, Artificial Sequence
  Synthetic Oligonucleotide
aggaacaagcuguggauauaugcaa

SEQ ID NO: 11143 - RNA, 25 nt, Artificial Sequence
  Synthetic Oligonucleotide
aagagcaagcuguggauauaugcaa

SEQ ID NO: 11144 - RNA, 25 nt, Artificial Sequence
  Synthetic Oligonucleotide
aagaacaggcuguggauauaugcaa

SEQ ID NO: 11145 - RNA, 25 nt, Artificial Sequence
  Synthetic Oligonucleotide
aagaacaagcuguggguauaugcaa

SEQ ID NO: 11146 - RNA, 25 nt, Artificial Sequence
  Synthetic Oligonucleotide
aggaacaagcuguggauauauguaa

SEQ ID NO: 11147 - RNA, 25 nt, Artificial Sequence
  Synthetic Oligonucleotide
aagaacaagcuguggacauaugcaa

SEQ ID NO: 11148 - RNA, 25 nt, Artificial Sequence
  Synthetic Oligonucleotide
aagaacaagcuguagauauaugcaa

SEQ ID NO: 11149 - RNA, 25 nt, Artificial Sequence
  Synthetic Oligonucleotide
aagaacaagccguggauauaugcaa

SEQ ID NO: 11150 - RNA, 25 nt, Artificial Sequence
  Synthetic Oligonucleotide
aagaacaagcuguugauauaugcaa

SEQ ID NO: 11151 - RNA, 25 nt, Artificial Sequence
  Synthetic Oligonucleotide
aagaacaagcaguggauauaugcaa

SEQ ID NO: 11152 - RNA, 25 nt, Artificial Sequence
  Synthetic Oligonucleotide
aagaacaagccguggauauauguaa

SEQ ID NO: 11153 - RNA, 25 nt, Artificial Sequence
  Synthetic Oligonucleotide
aggaacaagcuguggguauaugcaa

SEQ ID NO: 11154 - RNA, 25 nt, Artificial Sequence
  Synthetic Oligonucleotide
aggagcaagcuguggauauaugcaa

SEQ ID NO: 11155 - RNA, 25 nt, Artificial Sequence
  Synthetic Oligonucleotide
aagagcaagcuguagauauaugcaa

SEQ ID NO: 11156 - RNA, 25 nt, Artificial Sequence
  Synthetic Oligonucleotide
aagaacaagcugugggcauaugcaa

SEQ ID NO: 11157 - RNA, 25 nt, Artificial Sequence
  Synthetic Oligonucleotide
aagagcaagccguggauauaugcaa

SEQ ID NO: 11158 - RNA, 25 nt, Artificial Sequence
  Synthetic Oligonucleotide
aagagcaagcugugaauauaugcaa

SEQ ID NO: 11159 - RNA, 25 nt, Artificial Sequence
  Synthetic Oligonucleotide
aggaacaagcuguggacauaugcaa

SEQ ID NO: 11160 - RNA, 25 nt, Artificial Sequence
  Synthetic Oligonucleotide
aagagcaagcuguggaaauaugcaa

SEQ ID NO: 11161 - RNA, 25 nt, Artificial Sequence
  Synthetic Oligonucleotide
aagagcaagcuguggacauaugcaa

SEQ ID NO: 11162 - RNA, 25 nt, Artificial Sequence
  Synthetic Oligonucleotide
aagaacaagcaguagauauaugcaa

SEQ ID NO: 11163 - RNA, 25 nt, Artificial Sequence
  Synthetic Oligonucleotide
aagaacaagcuguugacauaugcaa

SEQ ID NO: 11164 - RNA, 25 nt, Artificial Sequence
  Synthetic Oligonucleotide
aagagcaagccguggauauuugcaa

SEQ ID NO: 11165 - RNA, 25 nt, Artificial Sequence
  Synthetic Oligonucleotide
aagagcaagccguggguauaugcaa

SEQ ID NO: 11166 - RNA, 25 nt, Artificial Sequence
  Synthetic Oligonucleotide
aggagcaagccguggauauaugcaa

SEQ ID NO: 11167 - RNA, 25 nt, Artificial Sequence
  Synthetic Oligonucleotide
aagagcaagccguugauauaugcaa

SEQ ID NO: 11168 - RNA, 25 nt, Artificial Sequence
  Synthetic Oligonucleotide
gaagaacaagcuguggauauaugua

SEQ ID NO: 11169 - RNA, 25 nt, Artificial Sequence
  Synthetic Oligonucleotide
gaagaacaagcuguggauauuugca

SEQ ID NO: 11170 - RNA, 25 nt, Artificial Sequence
  Synthetic Oligonucleotide
gaggaacaagcuguggauauaugca

SEQ ID NO: 11171 - RNA, 25 nt, Artificial Sequence
  Synthetic Oligonucleotide
gaagagcaagcuguggauauaugca

SEQ ID NO: 11172 - RNA, 25 nt, Artificial Sequence
  Synthetic Oligonucleotide
gaagaacaggcuguggauauaugca

SEQ ID NO: 11173 - RNA, 25 nt, Artificial Sequence
  Synthetic Oligonucleotide
gaagaacaagcuguggguauaugca

SEQ ID NO: 11174 - RNA, 25 nt, Artificial Sequence
  Synthetic Oligonucleotide
gaggaacaagcuguggauauaugua

SEQ ID NO: 11175 - RNA, 25 nt, Artificial Sequence
  Synthetic Oligonucleotide
gaagaacaagcuguggacauaugca

SEQ ID NO: 11176 - RNA, 25 nt, Artificial Sequence
  Synthetic Oligonucleotide
gaagaacaagcuguagauauaugca

SEQ ID NO: 11177 - RNA, 25 nt, Artificial Sequence
  Synthetic Oligonucleotide
gaagaacaagccguggauauaugca

SEQ ID NO: 11178 - RNA, 25 nt, Artificial Sequence
  Synthetic Oligonucleotide
gaagaacaagcuguugauauaugca

SEQ ID NO: 11179 - RNA, 25 nt, Artificial Sequence
  Synthetic Oligonucleotide
gaagaacaagcaguggauauaugca

SEQ ID NO: 11180 - RNA, 25 nt, Artificial Sequence
  Synthetic Oligonucleotide
gaagaacaagccguggauauaugua

SEQ ID NO: 11181 - RNA, 25 nt, Artificial Sequence
  Synthetic Oligonucleotide
gaggaacaagcuguggguauaugca

SEQ ID NO: 11182 - RNA, 25 nt, Artificial Sequence
  Synthetic Oligonucleotide
gaggagcaagcuguggauauaugca

SEQ ID NO: 11183 - RNA, 25 nt, Artificial Sequence
  Synthetic Oligonucleotide
gaagagcaagcuguagauauaugca

SEQ ID NO: 11184 - RNA, 25 nt, Artificial Sequence
  Synthetic Oligonucleotide
gaagaacaagcugugggcauaugca

SEQ ID NO: 11185 - RNA, 25 nt, Artificial Sequence
  Synthetic Oligonucleotide
gaagagcaagccguggauauaugca

SEQ ID NO: 11186 - RNA, 25 nt, Artificial Sequence
  Synthetic Oligonucleotide
gaagagcaagcugugaauauaugca

SEQ ID NO: 11187 - RNA, 25 nt, Artificial Sequence
  Synthetic Oligonucleotide
gaggaacaagcuguggacauaugca

SEQ ID NO: 11188 - RNA, 25 nt, Artificial Sequence
  Synthetic Oligonucleotide
gaagagcaagcuguggaaauaugca

SEQ ID NO: 11189 - RNA, 25 nt, Artificial Sequence
  Synthetic Oligonucleotide
gaagagcaagcuguggacauaugca

SEQ ID NO: 11190 - RNA, 25 nt, Artificial Sequence
  Synthetic Oligonucleotide
gaagaacaagcaguagauauaugca

SEQ ID NO: 11191 - RNA, 25 nt, Artificial Sequence
  Synthetic Oligonucleotide
gaagaacaagcuguugacauaugca

SEQ ID NO: 11192 - RNA, 25 nt, Artificial Sequence
  Synthetic Oligonucleotide
gaagagcaagccguggauauuugca

SEQ ID NO: 11193 - RNA, 25 nt, Artificial Sequence
  Synthetic Oligonucleotide
gaagagcaagccguggguauaugca

SEQ ID NO: 11194 - RNA, 25 nt, Artificial Sequence
  Synthetic Oligonucleotide
gaggagcaagccguggauauaugca

SEQ ID NO: 11195 - RNA, 25 nt, Artificial Sequence
  Synthetic Oligonucleotide
gaagagcaagccguugauauaugca

SEQ ID NO: 11196 - RNA, 25 nt, Artificial Sequence
  Synthetic Oligonucleotide
uuugcagccgcuccaccaaagcaga

SEQ ID NO: 11197 - RNA, 25 nt, Artificial Sequence
  Synthetic Oligonucleotide
uuugcagccgcuccaccaaggcaaa

SEQ ID NO: 11198 - RNA, 25 nt, Artificial Sequence
  Synthetic Oligonucleotide
uuugcagccgcuccaccaaaacaaa

SEQ ID NO: 11199 - RNA, 25 nt, Artificial Sequence
  Synthetic Oligonucleotide
uuugcagccgcuccgccaaagcaaa

SEQ ID NO: 11200 - RNA, 25 nt, Artificial Sequence
  Synthetic Oligonucleotide
uuugcagccgcuccaccgaagcaaa

SEQ ID NO: 11201 - RNA, 25 nt, Artificial Sequence
  Synthetic Oligonucleotide
uuugcagcugcuccaccaaagcaaa

SEQ ID NO: 11202 - RNA, 25 nt, Artificial Sequence
  Synthetic Oligonucleotide
uuugcagccgccccaccaaagcaaa

SEQ ID NO: 11203 - RNA, 25 nt, Artificial Sequence
  Synthetic Oligonucleotide
uucgcagccgcuccaccaaagcaaa

SEQ ID NO: 11204 - RNA, 25 nt, Artificial Sequence
  Synthetic Oligonucleotide
uuugcugccgcuccaccaaagcaaa

SEQ ID NO: 11205 - RNA, 25 nt, Artificial Sequence
  Synthetic Oligonucleotide
uuugcagcagcuccaccaaagcaaa

SEQ ID NO: 11206 - RNA, 25 nt, Artificial Sequence
  Synthetic Oligonucleotide
uuugcagccgcuccacccaagcaaa

SEQ ID NO: 11207 - RNA, 25 nt, Artificial Sequence
  Synthetic Oligonucleotide
uuugcagccgcuccuccaaagcaaa

SEQ ID NO: 11208 - RNA, 25 nt, Artificial Sequence
  Synthetic Oligonucleotide
uuugcagccgcaccaccaaagcaaa

SEQ ID NO: 11209 - RNA, 25 nt, Artificial Sequence
  Synthetic Oligonucleotide
uuugcagcugcuccaccaaaacaaa

SEQ ID NO: 11210 - RNA, 25 nt, Artificial Sequence
  Synthetic Oligonucleotide
uuugcagccgccccaccaaagcaga

SEQ ID NO: 11211 - RNA, 25 nt, Artificial Sequence
  Synthetic Oligonucleotide
uuugcagccgccccaccaaaacaaa

SEQ ID NO: 11212 - RNA, 25 nt, Artificial Sequence
  Synthetic Oligonucleotide
uuugcaaccgccccaccaaagcaaa

SEQ ID NO: 11213 - RNA, 25 nt, Artificial Sequence
  Synthetic Oligonucleotide
uuugcagcagccccaccaaagcaga

SEQ ID NO: 11214 - RNA, 25 nt, Artificial Sequence
  Synthetic Oligonucleotide
uuugcagcagccccaccagagcaga

SEQ ID NO: 11215 - RNA, 25 nt, Artificial Sequence
  Synthetic Oligonucleotide
uuugcagcagccccaccgaagcaga

SEQ ID NO: 11216 - RNA, 25 nt, Artificial Sequence
  Synthetic Oligonucleotide
uuugcagcagccccgccaaagcaga

SEQ ID NO: 11217 - RNA, 25 nt, Artificial Sequence
  Synthetic Oligonucleotide
uuugcugcugcuccaccagaacaaa

SEQ ID NO: 11218 - RNA, 25 nt, Artificial Sequence
  Synthetic Oligonucleotide
uuugcagcagccccaccgaaacaga

SEQ ID NO: 11219 - RNA, 25 nt, Artificial Sequence
  Synthetic Oligonucleotide
uuugcagcagccccaccuaaacaga

SEQ ID NO: 11220 - RNA, 25 nt, Artificial Sequence
  Synthetic Oligonucleotide
uugcagccgcuccaccaaagcagag

SEQ ID NO: 11221 - RNA, 25 nt, Artificial Sequence
  Synthetic Oligonucleotide
uugcagccgcuccaccaaaacaaag

SEQ ID NO: 11222 - RNA, 25 nt, Artificial Sequence
  Synthetic Oligonucleotide
uugcagccgcuccgccaaagcaaag

SEQ ID NO: 11223 - RNA, 25 nt, Artificial Sequence
  Synthetic Oligonucleotide
uugcagccgcuccaccaaggcaaag

SEQ ID NO: 11224 - RNA, 25 nt, Artificial Sequence
  Synthetic Oligonucleotide
uugcagccgcuccaccgaagcaaag

SEQ ID NO: 11225 - RNA, 25 nt, Artificial Sequence
  Synthetic Oligonucleotide
uugcagcugcuccaccaaagcaaag

SEQ ID NO: 11226 - RNA, 25 nt, Artificial Sequence
  Synthetic Oligonucleotide
uugcagccgccccaccaaagcaaag

SEQ ID NO: 11227 - RNA, 25 nt, Artificial Sequence
  Synthetic Oligonucleotide
ucgcagccgcuccaccaaagcaaag

SEQ ID NO: 11228 - RNA, 25 nt, Artificial Sequence
  Synthetic Oligonucleotide
uugcugccgcuccaccaaagcaaag

SEQ ID NO: 11229 - RNA, 25 nt, Artificial Sequence
  Synthetic Oligonucleotide
uugcagcagcuccaccaaagcaaag

SEQ ID NO: 11230 - RNA, 25 nt, Artificial Sequence
  Synthetic Oligonucleotide
uugcagccgcuccacccaagcaaag

SEQ ID NO: 11231 - RNA, 25 nt, Artificial Sequence
  Synthetic Oligonucleotide
uugcagccgcuccuccaaagcaaag

SEQ ID NO: 11232 - RNA, 25 nt, Artificial Sequence
  Synthetic Oligonucleotide
uugcagccgcaccaccaaagcaaag

SEQ ID NO: 11233 - RNA, 25 nt, Artificial Sequence
  Synthetic Oligonucleotide
uugcagcugcuccaccaaaacaaag

SEQ ID NO: 11234 - RNA, 25 nt, Artificial Sequence
  Synthetic Oligonucleotide
uugcagccgccccaccaaagcagag

SEQ ID NO: 11235 - RNA, 25 nt, Artificial Sequence
  Synthetic Oligonucleotide
uugcagccgccccaccaaaacaaag

SEQ ID NO: 11236 - RNA, 25 nt, Artificial Sequence
  Synthetic Oligonucleotide
uugcaaccgccccaccaaagcaaag

SEQ ID NO: 11237 - RNA, 25 nt, Artificial Sequence
  Synthetic Oligonucleotide
uugcagcagccccaccaaagcagag

SEQ ID NO: 11238 - RNA, 25 nt, Artificial Sequence
  Synthetic Oligonucleotide
uugcagcagccccaccagagcagag

SEQ ID NO: 11239 - RNA, 25 nt, Artificial Sequence
  Synthetic Oligonucleotide
uugcagcagccccaccgaagcagag

SEQ ID NO: 11240 - RNA, 25 nt, Artificial Sequence
  Synthetic Oligonucleotide
uugcagcagccccgccaaagcagag

SEQ ID NO: 11241 - RNA, 25 nt, Artificial Sequence
  Synthetic Oligonucleotide
uugcugcugcuccaccagaacaaag

SEQ ID NO: 11242 - RNA, 25 nt, Artificial Sequence
  Synthetic Oligonucleotide
uugcagcagccccaccgaagcagaa

SEQ ID NO: 11243 - RNA, 25 nt, Artificial Sequence
  Synthetic Oligonucleotide
uugcagcagccccaccgaaacagag

SEQ ID NO: 11244 - RNA, 25 nt, Artificial Sequence
  Synthetic Oligonucleotide
uugcagcagccccaccuaaacagag

SEQ ID NO: 11245 - RNA, 25 nt, Artificial Sequence
  Synthetic Oligonucleotide
ugaagaucuguuccaccauugaaaa

SEQ ID NO: 11246 - RNA, 25 nt, Artificial Sequence
  Synthetic Oligonucleotide
ugaagaucuguuccaccauuaaaga

SEQ ID NO: 11247 - RNA, 25 nt, Artificial Sequence
  Synthetic Oligonucleotide
ugaagaucuguucuaccauugaaga

SEQ ID NO: 11248 - RNA, 25 nt, Artificial Sequence
  Synthetic Oligonucleotide
ugaagaucuguuacaccauugaaga

SEQ ID NO: 11249 - RNA, 25 nt, Artificial Sequence
  Synthetic Oligonucleotide
ugaagaucuguuucaccauugaaga

SEQ ID NO: 11250 - RNA, 25 nt, Artificial Sequence
  Synthetic Oligonucleotide
ugaagaucugcuccaccauugaaga

SEQ ID NO: 11251 - RNA, 25 nt, Artificial Sequence
  Synthetic Oligonucleotide
ugaagaccuguuccaccauugaaga

SEQ ID NO: 11252 - RNA, 25 nt, Artificial Sequence
  Synthetic Oligonucleotide
ugaaaaucuguuccaccauugaaga

SEQ ID NO: 11253 - RNA, 25 nt, Artificial Sequence
  Synthetic Oligonucleotide
ugaggaucuguuccaccauugaaga

SEQ ID NO: 11254 - RNA, 25 nt, Artificial Sequence
  Synthetic Oligonucleotide
cgaagaucuguuccaccauugaaga

SEQ ID NO: 11255 - RNA, 25 nt, Artificial Sequence
  Synthetic Oligonucleotide
ugaagaccuguucuaccauugaaga

SEQ ID NO: 11256 - RNA, 25 nt, Artificial Sequence
  Synthetic Oligonucleotide
ugaagaccugcuccaccauugaaga

SEQ ID NO: 11257 - RNA, 25 nt, Artificial Sequence
  Synthetic Oligonucleotide
uaaagaccuguuccaccauugaaga

SEQ ID NO: 11258 - RNA, 25 nt, Artificial Sequence
  Synthetic Oligonucleotide
uaaagaccugcuccaccauugaaga

SEQ ID NO: 11259 - RNA, 25 nt, Artificial Sequence
  Synthetic Oligonucleotide
caugaagaucuguuccaccauuaaa

SEQ ID NO: 11260 - RNA, 25 nt, Artificial Sequence
  Synthetic Oligonucleotide
caugaagaucuguucuaccauugaa

SEQ ID NO: 11261 - RNA, 25 nt, Artificial Sequence
  Synthetic Oligonucleotide
caugaagaucuguuacaccauugaa

SEQ ID NO: 11262 - RNA, 25 nt, Artificial Sequence
  Synthetic Oligonucleotide
caugaagaucuguuucaccauugaa

SEQ ID NO: 11263 - RNA, 25 nt, Artificial Sequence
  Synthetic Oligonucleotide
caugaagaucugcuccaccauugaa

SEQ ID NO: 11264 - RNA, 25 nt, Artificial Sequence
  Synthetic Oligonucleotide
caugaagaccuguuccaccauugaa

SEQ ID NO: 11265 - RNA, 25 nt, Artificial Sequence
  Synthetic Oligonucleotide
caugaaaaucuguuccaccauugaa

SEQ ID NO: 11266 - RNA, 25 nt, Artificial Sequence
  Synthetic Oligonucleotide
caugaggaucuguuccaccauugaa

SEQ ID NO: 11267 - RNA, 25 nt, Artificial Sequence
  Synthetic Oligonucleotide
cacgaagaucuguuccaccauugaa

SEQ ID NO: 11268 - RNA, 25 nt, Artificial Sequence
  Synthetic Oligonucleotide
ccugaagaucuguuccaccauugaa

SEQ ID NO: 11269 - RNA, 25 nt, Artificial Sequence
  Synthetic Oligonucleotide
cuugaagaucuguuccaccauugaa

SEQ ID NO: 11270 - RNA, 25 nt, Artificial Sequence
  Synthetic Oligonucleotide
caugaagaccuguucuaccauugaa

SEQ ID NO: 11271 - RNA, 25 nt, Artificial Sequence
  Synthetic Oligonucleotide
caugaagaccugcuccaccauugaa

SEQ ID NO: 11272 - RNA, 25 nt, Artificial Sequence
  Synthetic Oligonucleotide
cauaaagaccuguuccaccauugaa

SEQ ID NO: 11273 - RNA, 25 nt, Artificial Sequence
  Synthetic Oligonucleotide
cauaaagaccugcuccaccauugaa

SEQ ID NO: 11274 - RNA, 25 nt, Artificial Sequence
  Synthetic Oligonucleotide
aucaugaagaucuguuccaccauua

SEQ ID NO: 11275 - RNA, 25 nt, Artificial Sequence
  Synthetic Oligonucleotide
aucaugaagaucuguucuaccauug

SEQ ID NO: 11276 - RNA, 25 nt, Artificial Sequence
  Synthetic Oligonucleotide
aucaugaagaucuguuacaccauug

SEQ ID NO: 11277 - RNA, 25 nt, Artificial Sequence
  Synthetic Oligonucleotide
aucaugaagaucuguuucaccauug

SEQ ID NO: 11278 - RNA, 25 nt, Artificial Sequence
  Synthetic Oligonucleotide
aucaugaagaucugcuccaccauug

SEQ ID NO: 11279 - RNA, 25 nt, Artificial Sequence
  Synthetic Oligonucleotide
aucaugaagaccuguuccaccauug

SEQ ID NO: 11280 - RNA, 25 nt, Artificial Sequence
  Synthetic Oligonucleotide
aucaugaaaaucuguuccaccauug

SEQ ID NO: 11281 - RNA, 25 nt, Artificial Sequence
  Synthetic Oligonucleotide
aucaugaggaucuguuccaccauug

SEQ ID NO: 11282 - RNA, 25 nt, Artificial Sequence
  Synthetic Oligonucleotide
aucacgaagaucuguuccaccauug

SEQ ID NO: 11283 - RNA, 25 nt, Artificial Sequence
  Synthetic Oligonucleotide
auccugaagaucuguuccaccauug

SEQ ID NO: 11284 - RNA, 25 nt, Artificial Sequence
  Synthetic Oligonucleotide
aucuugaagaucuguuccaccauug

SEQ ID NO: 11285 - RNA, 25 nt, Artificial Sequence
  Synthetic Oligonucleotide
accaugaagaucuguuccaccauug

SEQ ID NO: 11286 - RNA, 25 nt, Artificial Sequence
  Synthetic Oligonucleotide
aucaugaagaccuguucuaccauug

SEQ ID NO: 11287 - RNA, 25 nt, Artificial Sequence
  Synthetic Oligonucleotide
aucaugaagaccugcuccaccauug

SEQ ID NO: 11288 - RNA, 25 nt, Artificial Sequence
  Synthetic Oligonucleotide
aucauaaagaccuguuccaccauug

SEQ ID NO: 11289 - RNA, 25 nt, Artificial Sequence
  Synthetic Oligonucleotide
aucauaaagaccugcuccaccauug

SEQ ID NO: 11290 - RNA, 25 nt, Artificial Sequence
  Synthetic Oligonucleotide
ucaugaagaucuguuccaccauuaa

SEQ ID NO: 11291 - RNA, 25 nt, Artificial Sequence
  Synthetic Oligonucleotide
ucaugaagaucuguucuaccauuga

SEQ ID NO: 11292 - RNA, 25 nt, Artificial Sequence
  Synthetic Oligonucleotide
ucaugaagaucuguuacaccauuga

SEQ ID NO: 11293 - RNA, 25 nt, Artificial Sequence
  Synthetic Oligonucleotide
ucaugaagaucuguuucaccauuga

SEQ ID NO: 11294 - RNA, 25 nt, Artificial Sequence
  Synthetic Oligonucleotide
ucaugaagaucugcuccaccauuga

SEQ ID NO: 11295 - RNA, 25 nt, Artificial Sequence
  Synthetic Oligonucleotide
ucaugaagaccuguuccaccauuga

SEQ ID NO: 11296 - RNA, 25 nt, Artificial Sequence
  Synthetic Oligonucleotide
ucaugaaaaucuguuccaccauuga

SEQ ID NO: 11297 - RNA, 25 nt, Artificial Sequence
  Synthetic Oligonucleotide
ucaugaggaucuguuccaccauuga

SEQ ID NO: 11298 - RNA, 25 nt, Artificial Sequence
  Synthetic Oligonucleotide
ucacgaagaucuguuccaccauuga

SEQ ID NO: 11299 - RNA, 25 nt, Artificial Sequence
  Synthetic Oligonucleotide
uccugaagaucuguuccaccauuga

SEQ ID NO: 11300 - RNA, 25 nt, Artificial Sequence
  Synthetic Oligonucleotide
ucuugaagaucuguuccaccauuga

SEQ ID NO: 11301 - RNA, 25 nt, Artificial Sequence
  Synthetic Oligonucleotide
ccaugaagaucuguuccaccauuga

SEQ ID NO: 11302 - RNA, 25 nt, Artificial Sequence
  Synthetic Oligonucleotide
ucaugaagaccuguucuaccauuga

SEQ ID NO: 11303 - RNA, 25 nt, Artificial Sequence
  Synthetic Oligonucleotide
ucaugaagaccugcuccaccauuga

SEQ ID NO: 11304 - RNA, 25 nt, Artificial Sequence
  Synthetic Oligonucleotide
ucauaaagaccuguuccaccauuga

SEQ ID NO: 11305 - RNA, 25 nt, Artificial Sequence
  Synthetic Oligonucleotide
ucauaaagaccugcuccaccauuga

SEQ ID NO: 11306 - RNA, 25 nt, Artificial Sequence
  Synthetic Oligonucleotide
augaagaucuguuccaccauugaaa

SEQ ID NO: 11307 - RNA, 25 nt, Artificial Sequence
  Synthetic Oligonucleotide
augaagaucuguuccaccauuaaag

SEQ ID NO: 11308 - RNA, 25 nt, Artificial Sequence
  Synthetic Oligonucleotide
augaagaucuguucuaccauugaag

SEQ ID NO: 11309 - RNA, 25 nt, Artificial Sequence
  Synthetic Oligonucleotide
augaagaucuguuacaccauugaag

SEQ ID NO: 11310 - RNA, 25 nt, Artificial Sequence
  Synthetic Oligonucleotide
augaagaucuguuucaccauugaag

SEQ ID NO: 11311 - RNA, 25 nt, Artificial Sequence
  Synthetic Oligonucleotide
augaagaucugcuccaccauugaag

SEQ ID NO: 11312 - RNA, 25 nt, Artificial Sequence
  Synthetic Oligonucleotide
augaagaccuguuccaccauugaag

SEQ ID NO: 11313 - RNA, 25 nt, Artificial Sequence
  Synthetic Oligonucleotide
augaaaaucuguuccaccauugaag

SEQ ID NO: 11314 - RNA, 25 nt, Artificial Sequence
  Synthetic Oligonucleotide
augaggaucuguuccaccauugaag

SEQ ID NO: 11315 - RNA, 25 nt, Artificial Sequence
  Synthetic Oligonucleotide
acgaagaucuguuccaccauugaag

SEQ ID NO: 11316 - RNA, 25 nt, Artificial Sequence
  Synthetic Oligonucleotide
cugaagaucuguuccaccauugaag

SEQ ID NO: 11317 - RNA, 25 nt, Artificial Sequence
  Synthetic Oligonucleotide
uugaagaucuguuccaccauugaag

SEQ ID NO: 11318 - RNA, 25 nt, Artificial Sequence
  Synthetic Oligonucleotide
augaagaccuguucuaccauugaag

SEQ ID NO: 11319 - RNA, 25 nt, Artificial Sequence
  Synthetic Oligonucleotide
augaagaccugcuccaccauugaag

SEQ ID NO: 11320 - RNA, 25 nt, Artificial Sequence
  Synthetic Oligonucleotide
auaaagaccuguuccaccauugaag

SEQ ID NO: 11321 - RNA, 25 nt, Artificial Sequence
  Synthetic Oligonucleotide
auaaagaccugcuccaccauugaag

SEQ ID NO: 11322 - RNA, 25 nt, Artificial Sequence
  Synthetic Oligonucleotide
gaucaugaagaucuguucuaccauu

SEQ ID NO: 11323 - RNA, 25 nt, Artificial Sequence
  Synthetic Oligonucleotide
gaucaugaagaucuguuacaccauu

SEQ ID NO: 11324 - RNA, 25 nt, Artificial Sequence
  Synthetic Oligonucleotide
gaucaugaagaucuguuucaccauu

SEQ ID NO: 11325 - RNA, 25 nt, Artificial Sequence
  Synthetic Oligonucleotide
gaucaugaagaucugcuccaccauu

SEQ ID NO: 11326 - RNA, 25 nt, Artificial Sequence
  Synthetic Oligonucleotide
gaucaugaagaccuguuccaccauu

SEQ ID NO: 11327 - RNA, 25 nt, Artificial Sequence
  Synthetic Oligonucleotide
gaucaugaaaaucuguuccaccauu

SEQ ID NO: 11328 - RNA, 25 nt, Artificial Sequence
  Synthetic Oligonucleotide
gaucaugaggaucuguuccaccauu

SEQ ID NO: 11329 - RNA, 25 nt, Artificial Sequence
  Synthetic Oligonucleotide
gaucacgaagaucuguuccaccauu

SEQ ID NO: 11330 - RNA, 25 nt, Artificial Sequence
  Synthetic Oligonucleotide
gauccugaagaucuguuccaccauu

SEQ ID NO: 11331 - RNA, 25 nt, Artificial Sequence
  Synthetic Oligonucleotide
gaucuugaagaucuguuccaccauu

SEQ ID NO: 11332 - RNA, 25 nt, Artificial Sequence
  Synthetic Oligonucleotide
gaccaugaagaucuguuccaccauu

SEQ ID NO: 11333 - RNA, 25 nt, Artificial Sequence
  Synthetic Oligonucleotide
aaucaugaagaucuguuccaccauu

SEQ ID NO: 11334 - RNA, 25 nt, Artificial Sequence
  Synthetic Oligonucleotide
gaucaugaagaccuguucuaccauu

SEQ ID NO: 11335 - RNA, 25 nt, Artificial Sequence
  Synthetic Oligonucleotide
gaucaugaagaccugcuccaccauu

SEQ ID NO: 11336 - RNA, 25 nt, Artificial Sequence
  Synthetic Oligonucleotide
gaucauaaagaccuguuccaccauu

SEQ ID NO: 11337 - RNA, 25 nt, Artificial Sequence
  Synthetic Oligonucleotide
gaucauaaagaccugcuccaccauu

SEQ ID NO: 11338 - RNA, 25 nt, Artificial Sequence
  Synthetic Oligonucleotide
agaucaugaagaucuguucuaccau

SEQ ID NO: 11339 - RNA, 25 nt, Artificial Sequence
  Synthetic Oligonucleotide
agaucaugaagaucuguuacaccau

SEQ ID NO: 11340 - RNA, 25 nt, Artificial Sequence
  Synthetic Oligonucleotide
agaucaugaagaucuguuucaccau

SEQ ID NO: 11341 - RNA, 25 nt, Artificial Sequence
  Synthetic Oligonucleotide
agaucaugaagaucugcuccaccau

SEQ ID NO: 11342 - RNA, 25 nt, Artificial Sequence
  Synthetic Oligonucleotide
agaucaugaagaccuguuccaccau

SEQ ID NO: 11343 - RNA, 25 nt, Artificial Sequence
  Synthetic Oligonucleotide
agaucaugaagaccuguucuaccau

SEQ ID NO: 11344 - RNA, 25 nt, Artificial Sequence
  Synthetic Oligonucleotide
agaucaugaaaaucuguuccaccau

SEQ ID NO: 11345 - RNA, 25 nt, Artificial Sequence
  Synthetic Oligonucleotide
agaucaugaggaucuguuccaccau

SEQ ID NO: 11346 - RNA, 25 nt, Artificial Sequence
  Synthetic Oligonucleotide
agaucacgaagaucuguuccaccau

SEQ ID NO: 11347 - RNA, 25 nt, Artificial Sequence
  Synthetic Oligonucleotide
agauccugaagaucuguuccaccau

SEQ ID NO: 11348 - RNA, 25 nt, Artificial Sequence
  Synthetic Oligonucleotide
agaucuugaagaucuguuccaccau

SEQ ID NO: 11349 - RNA, 25 nt, Artificial Sequence
  Synthetic Oligonucleotide
agaccaugaagaucuguuccaccau

SEQ ID NO: 11350 - RNA, 25 nt, Artificial Sequence
  Synthetic Oligonucleotide
aaaucaugaagaucuguuccaccau

SEQ ID NO: 11351 - RNA, 25 nt, Artificial Sequence
  Synthetic Oligonucleotide
ggaucaugaagaucuguuccaccau

SEQ ID NO: 11352 - RNA, 25 nt, Artificial Sequence
  Synthetic Oligonucleotide
agaucaugaagaccugcuccaccau

SEQ ID NO: 11353 - RNA, 25 nt, Artificial Sequence
  Synthetic Oligonucleotide
agaucauaaagaccuguuccaccau

SEQ ID NO: 11354 - RNA, 25 nt, Artificial Sequence
  Synthetic Oligonucleotide
agaucauaaagaccugcuccaccau

SEQ ID NO: 11355 - RNA, 25 nt, Artificial Sequence
  Synthetic Oligonucleotide
gagaucaugaagaucuguucuacca

SEQ ID NO: 11356 - RNA, 25 nt, Artificial Sequence
  Synthetic Oligonucleotide
gagaucaugaagaucuguuacacca

SEQ ID NO: 11357 - RNA, 25 nt, Artificial Sequence
  Synthetic Oligonucleotide
gagaucaugaagaucuguuucacca

SEQ ID NO: 11358 - RNA, 25 nt, Artificial Sequence
  Synthetic Oligonucleotide
gagaucaugaagaucugcuccacca

SEQ ID NO: 11359 - RNA, 25 nt, Artificial Sequence
  Synthetic Oligonucleotide
gagaucaugaagaccuguuccacca

SEQ ID NO: 11360 - RNA, 25 nt, Artificial Sequence
  Synthetic Oligonucleotide
gagaucaugaagaccuguucuacca

SEQ ID NO: 11361 - RNA, 25 nt, Artificial Sequence
  Synthetic Oligonucleotide
gagaucaugaaaaucuguuccacca

SEQ ID NO: 11362 - RNA, 25 nt, Artificial Sequence
  Synthetic Oligonucleotide
gagaucaugaggaucuguuccacca

SEQ ID NO: 11363 - RNA, 25 nt, Artificial Sequence
  Synthetic Oligonucleotide
gagaucacgaagaucuguuccacca

SEQ ID NO: 11364 - RNA, 25 nt, Artificial Sequence
  Synthetic Oligonucleotide
gagauccugaagaucuguuccacca

SEQ ID NO: 11365 - RNA, 25 nt, Artificial Sequence
  Synthetic Oligonucleotide
gagaucuugaagaucuguuccacca

SEQ ID NO: 11366 - RNA, 25 nt, Artificial Sequence
  Synthetic Oligonucleotide
gagaccaugaagaucuguuccacca

SEQ ID NO: 11367 - RNA, 25 nt, Artificial Sequence
  Synthetic Oligonucleotide
gaaaucaugaagaucuguuccacca

SEQ ID NO: 11368 - RNA, 25 nt, Artificial Sequence
  Synthetic Oligonucleotide
gggaucaugaagaucuguuccacca

SEQ ID NO: 11369 - RNA, 25 nt, Artificial Sequence
  Synthetic Oligonucleotide
gagaucaugaagaccugcuccacca

SEQ ID NO: 11370 - RNA, 25 nt, Artificial Sequence
  Synthetic Oligonucleotide
gagaucauaaagaccuguuccacca

SEQ ID NO: 11371 - RNA, 25 nt, Artificial Sequence
  Synthetic Oligonucleotide
gagaucauaaagaccugcuccacca

SEQ ID NO: 11372 - RNA, 25 nt, Artificial Sequence
  Synthetic Oligonucleotide
ugaugaugggcauguucaacauguu

SEQ ID NO: 11373 - RNA, 25 nt, Artificial Sequence
  Synthetic Oligonucleotide
ugaugaugggcauguucaacaggcu

SEQ ID NO: 11374 - RNA, 25 nt, Artificial Sequence
  Synthetic Oligonucleotide
ugaugaugggcauguucaaaauguu

SEQ ID NO: 11375 - RNA, 25 nt, Artificial Sequence
  Synthetic Oligonucleotide
ugaugaugggcauguucaauauguu

SEQ ID NO: 11376 - RNA, 25 nt, Artificial Sequence
  Synthetic Oligonucleotide
ugaugaugggcauguuuaacaugcu

SEQ ID NO: 11377 - RNA, 25 nt, Artificial Sequence
  Synthetic Oligonucleotide
ugaugaugggcauguuuaauaugcu

SEQ ID NO: 11378 - RNA, 25 nt, Artificial Sequence
  Synthetic Oligonucleotide
ugaugaugggcauguuuaauauguu

SEQ ID NO: 11379 - RNA, 25 nt, Artificial Sequence
  Synthetic Oligonucleotide
ugaugaugggaauguucaacaugcu

SEQ ID NO: 11380 - RNA, 25 nt, Artificial Sequence
  Synthetic Oligonucleotide
ugaugauggguauguucaacaugcu

SEQ ID NO: 11381 - RNA, 25 nt, Artificial Sequence
  Synthetic Oligonucleotide
ugaugauggguauguucaauauguu

SEQ ID NO: 11382 - RNA, 25 nt, Artificial Sequence
  Synthetic Oligonucleotide
ugaugauggguauguuuaauauguu

SEQ ID NO: 11383 - RNA, 25 nt, Artificial Sequence
  Synthetic Oligonucleotide
augaugaugggcauguucaacaugu

SEQ ID NO: 11384 - RNA, 25 nt, Artificial Sequence
  Synthetic Oligonucleotide
augaugaugggcauguucaacaggc

SEQ ID NO: 11385 - RNA, 25 nt, Artificial Sequence
  Synthetic Oligonucleotide
augaugaugggcauguucaaaaugu

SEQ ID NO: 11386 - RNA, 25 nt, Artificial Sequence
  Synthetic Oligonucleotide
augaugaugggcauguucaauaugu

SEQ ID NO: 11387 - RNA, 25 nt, Artificial Sequence
  Synthetic Oligonucleotide
augaugaugggcauguuuaacaugc

SEQ ID NO: 11388 - RNA, 25 nt, Artificial Sequence
  Synthetic Oligonucleotide
augaugaugggcauguuuaauaugc

SEQ ID NO: 11389 - RNA, 25 nt, Artificial Sequence
  Synthetic Oligonucleotide
augaugaugggcauguuuaauaugu

SEQ ID NO: 11390 - RNA, 25 nt, Artificial Sequence
  Synthetic Oligonucleotide
augaugaugggaauguucaacaugc

SEQ ID NO: 11391 - RNA, 25 nt, Artificial Sequence
  Synthetic Oligonucleotide
augaugauggguauguucaacaugc

SEQ ID NO: 11392 - RNA, 25 nt, Artificial Sequence
  Synthetic Oligonucleotide
augaugauggguauguucaauaugu

SEQ ID NO: 11393 - RNA, 25 nt, Artificial Sequence
  Synthetic Oligonucleotide
augaugauggguauguuuaauaugu

SEQ ID NO: 11394 - RNA, 25 nt, Artificial Sequence
  Synthetic Oligonucleotide
uauaugaagcaauugaggaaugccu

SEQ ID NO: 11395 - RNA, 25 nt, Artificial Sequence
  Synthetic Oligonucleotide
uauaugaagcaaucgaggagugccu

SEQ ID NO: 11396 - RNA, 25 nt, Artificial Sequence
  Synthetic Oligonucleotide
uauaugaagcaguugaggagugccu

SEQ ID NO: 11397 - RNA, 25 nt, Artificial Sequence
  Synthetic Oligonucleotide
uauaugaagcaguugaggaaugccu

SEQ ID NO: 11398 - RNA, 25 nt, Artificial Sequence
  Synthetic Oligonucleotide
uauaugaagcgauugaggagugccu

SEQ ID NO: 11399 - RNA, 25 nt, Artificial Sequence
  Synthetic Oligonucleotide
uauaugaggcaauugaggagugccu

SEQ ID NO: 11400 - RNA, 25 nt, Artificial Sequence
  Synthetic Oligonucleotide
uauaugaugcaauugaggagugccu

SEQ ID NO: 11401 - RNA, 25 nt, Artificial Sequence
  Synthetic Oligonucleotide
uauaugaugcaauugaggagugugg

SEQ ID NO: 11402 - RNA, 25 nt, Artificial Sequence
  Synthetic Oligonucleotide
uauauggagcaauugaggagugccu

SEQ ID NO: 11403 - RNA, 25 nt, Artificial Sequence
  Synthetic Oligonucleotide
uauacgaagcaauugaggagugccu

SEQ ID NO: 11404 - RNA, 25 nt, Artificial Sequence
  Synthetic Oligonucleotide
uguaugaagcaauugaggagugccu

SEQ ID NO: 11405 - RNA, 25 nt, Artificial Sequence
  Synthetic Oligonucleotide
gaagcaauugaggagugccugguua

SEQ ID NO: 11406 - RNA, 25 nt, Artificial Sequence
  Synthetic Oligonucleotide
gaagcaauugaggagugccuaauua

SEQ ID NO: 11407 - RNA, 25 nt, Artificial Sequence
  Synthetic Oligonucleotide
gaagcaauugaggaaugccugauua

SEQ ID NO: 11408 - RNA, 25 nt, Artificial Sequence
  Synthetic Oligonucleotide
gaagcaaucgaggagugccugauua

SEQ ID NO: 11409 - RNA, 25 nt, Artificial Sequence
  Synthetic Oligonucleotide
gaagcaguugaggagugccugauua

SEQ ID NO: 11410 - RNA, 25 nt, Artificial Sequence
  Synthetic Oligonucleotide
gaagcaguugaggagugccuaauua

SEQ ID NO: 11411 - RNA, 25 nt, Artificial Sequence
  Synthetic Oligonucleotide
gaagcgauugaggagugccugauua

SEQ ID NO: 11412 - RNA, 25 nt, Artificial Sequence
  Synthetic Oligonucleotide
gaggcaauugaggagugccugauua

SEQ ID NO: 11413 - RNA, 25 nt, Artificial Sequence
  Synthetic Oligonucleotide
gaugcaauugaggagugccuaauua

SEQ ID NO: 11414 - RNA, 25 nt, Artificial Sequence
  Synthetic Oligonucleotide
ggagcaauugaggagugccugauua

SEQ ID NO: 11415 - RNA, 25 nt, Artificial Sequence
  Synthetic Oligonucleotide
gaagcaguugaggaaugccugauua

SEQ ID NO: 11416 - RNA, 25 nt, Artificial Sequence
  Synthetic Oligonucleotide
gaugcaauugaggagugugggauua

SEQ ID NO: 11417 - RNA, 25 nt, Artificial Sequence
  Synthetic Oligonucleotide
aagcaauugaggagugccugguuaa

SEQ ID NO: 11418 - RNA, 25 nt, Artificial Sequence
  Synthetic Oligonucleotide
aagcaauugaggagugccuaauuaa

SEQ ID NO: 11419 - RNA, 25 nt, Artificial Sequence
  Synthetic Oligonucleotide
aagcaauugaggaaugccugauuaa

SEQ ID NO: 11420 - RNA, 25 nt, Artificial Sequence
  Synthetic Oligonucleotide
aagcaaucgaggagugccugauuaa

SEQ ID NO: 11421 - RNA, 25 nt, Artificial Sequence
  Synthetic Oligonucleotide
aagcaguugaggagugccugauuaa

SEQ ID NO: 11422 - RNA, 25 nt, Artificial Sequence
  Synthetic Oligonucleotide
aagcaguugaggagugccuaauuaa

SEQ ID NO: 11423 - RNA, 25 nt, Artificial Sequence
  Synthetic Oligonucleotide
aagcgauugaggagugccugauuaa

SEQ ID NO: 11424 - RNA, 25 nt, Artificial Sequence
  Synthetic Oligonucleotide
aggcaauugaggagugccugauuaa

SEQ ID NO: 11425 - RNA, 25 nt, Artificial Sequence
  Synthetic Oligonucleotide
augcaauugaggagugccuaauuaa

SEQ ID NO: 11426 - RNA, 25 nt, Artificial Sequence
  Synthetic Oligonucleotide
gagcaauugaggagugccugauuaa

SEQ ID NO: 11427 - RNA, 25 nt, Artificial Sequence
  Synthetic Oligonucleotide
aagcaguugaggaaugccugauuaa

SEQ ID NO: 11428 - RNA, 25 nt, Artificial Sequence
  Synthetic Oligonucleotide
ugaagcaauugaggagugccugguu

SEQ ID NO: 11429 - RNA, 25 nt, Artificial Sequence
  Synthetic Oligonucleotide
ugaagcaauugaggagugccuaauu

SEQ ID NO: 11430 - RNA, 25 nt, Artificial Sequence
  Synthetic Oligonucleotide
ugaagcaauugaggaaugccugauu

SEQ ID NO: 11431 - RNA, 25 nt, Artificial Sequence
  Synthetic Oligonucleotide
ugaagcaaucgaggagugccugauu

SEQ ID NO: 11432 - RNA, 25 nt, Artificial Sequence
  Synthetic Oligonucleotide
ugaagcaguugaggagugccugauu

SEQ ID NO: 11433 - RNA, 25 nt, Artificial Sequence
  Synthetic Oligonucleotide
ugaagcaguugaggagugccuaauu

SEQ ID NO: 11434 - RNA, 25 nt, Artificial Sequence
  Synthetic Oligonucleotide
ugaagcgauugaggagugccugauu

SEQ ID NO: 11435 - RNA, 25 nt, Artificial Sequence
  Synthetic Oligonucleotide
ugaggcaauugaggagugccugauu

SEQ ID NO: 11436 - RNA, 25 nt, Artificial Sequence
  Synthetic Oligonucleotide
ugaugcaauugaggagugccuaauu

SEQ ID NO: 11437 - RNA, 25 nt, Artificial Sequence
  Synthetic Oligonucleotide
uggagcaauugaggagugccugauu

SEQ ID NO: 11438 - RNA, 25 nt, Artificial Sequence
  Synthetic Oligonucleotide
cgaagcaauugaggagugccugauu

SEQ ID NO: 11439 - RNA, 25 nt, Artificial Sequence
  Synthetic Oligonucleotide
ugaagcaguugaggaaugccugauu

SEQ ID NO: 11440 - RNA, 25 nt, Artificial Sequence
  Synthetic Oligonucleotide
ugaugcaauugaggagugugggauu

SEQ ID NO: 11441 - RNA, 25 nt, Artificial Sequence
  Synthetic Oligonucleotide
uaugaagcaauugaggagugccugg

SEQ ID NO: 11442 - RNA, 25 nt, Artificial Sequence
  Synthetic Oligonucleotide
uaugaagcaauugaggagugccuaa

SEQ ID NO: 11443 - RNA, 25 nt, Artificial Sequence
  Synthetic Oligonucleotide
uaugaagcaauugaggaaugccuga

SEQ ID NO: 11444 - RNA, 25 nt, Artificial Sequence
  Synthetic Oligonucleotide
uaugaagcaaucgaggagugccuga

SEQ ID NO: 11445 - RNA, 25 nt, Artificial Sequence
  Synthetic Oligonucleotide
uaugaagcaguugaggagugccuga

SEQ ID NO: 11446 - RNA, 25 nt, Artificial Sequence
  Synthetic Oligonucleotide
uaugaagcaguugaggagugccuaa

SEQ ID NO: 11447 - RNA, 25 nt, Artificial Sequence
  Synthetic Oligonucleotide
uaugaagcgauugaggagugccuga

SEQ ID NO: 11448 - RNA, 25 nt, Artificial Sequence
  Synthetic Oligonucleotide
uaugaggcaauugaggagugccuga

SEQ ID NO: 11449 - RNA, 25 nt, Artificial Sequence
  Synthetic Oligonucleotide
uaugaugcaauugaggagugccuaa

SEQ ID NO: 11450 - RNA, 25 nt, Artificial Sequence
  Synthetic Oligonucleotide
uaugaugcaauugaggaguguggga

SEQ ID NO: 11451 - RNA, 25 nt, Artificial Sequence
  Synthetic Oligonucleotide
uauggagcaauugaggagugccuga

SEQ ID NO: 11452 - RNA, 25 nt, Artificial Sequence
  Synthetic Oligonucleotide
uacgaagcaauugaggagugccuga

SEQ ID NO: 11453 - RNA, 25 nt, Artificial Sequence
  Synthetic Oligonucleotide
uaugaagcaguugaggaaugccuga

SEQ ID NO: 11454 - RNA, 25 nt, Artificial Sequence
  Synthetic Oligonucleotide
augaagcaauugaggagugccuggu

SEQ ID NO: 11455 - RNA, 25 nt, Artificial Sequence
  Synthetic Oligonucleotide
augaagcaauugaggagugccuaau

SEQ ID NO: 11456 - RNA, 25 nt, Artificial Sequence
  Synthetic Oligonucleotide
augaagcaauugaggaaugccugau

SEQ ID NO: 11457 - RNA, 25 nt, Artificial Sequence
  Synthetic Oligonucleotide
augaagcaaucgaggagugccugau

SEQ ID NO: 11458 - RNA, 25 nt, Artificial Sequence
  Synthetic Oligonucleotide
augaagcaguugaggagugccugau

SEQ ID NO: 11459 - RNA, 25 nt, Artificial Sequence
  Synthetic Oligonucleotide
augaagcaguugaggagugccuaau

SEQ ID NO: 11460 - RNA, 25 nt, Artificial Sequence
  Synthetic Oligonucleotide
augaagcgauugaggagugccugau

SEQ ID NO: 11461 - RNA, 25 nt, Artificial Sequence
  Synthetic Oligonucleotide
augaggcaauugaggagugccugau

SEQ ID NO: 11462 - RNA, 25 nt, Artificial Sequence
  Synthetic Oligonucleotide
augaugcaauugaggagugccuaau

SEQ ID NO: 11463 - RNA, 25 nt, Artificial Sequence
  Synthetic Oligonucleotide
augaugcaauugaggagugugggau

SEQ ID NO: 11464 - RNA, 25 nt, Artificial Sequence
  Synthetic Oligonucleotide
auggagcaauugaggagugccugau

SEQ ID NO: 11465 - RNA, 25 nt, Artificial Sequence
  Synthetic Oligonucleotide
acgaagcaauugaggagugccugau

SEQ ID NO: 11466 - RNA, 25 nt, Artificial Sequence
  Synthetic Oligonucleotide
augaagcaguugaggaaugccugau

SEQ ID NO: 11467 - RNA, 25 nt, Artificial Sequence
  Synthetic Oligonucleotide
cuauaugaagcaauugaggaaugcc

SEQ ID NO: 11468 - RNA, 25 nt, Artificial Sequence
  Synthetic Oligonucleotide
cuauaugaagcaaucgaggagugcc

SEQ ID NO: 11469 - RNA, 25 nt, Artificial Sequence
  Synthetic Oligonucleotide
cuauaugaagcaguugaggagugcc

SEQ ID NO: 11470 - RNA, 25 nt, Artificial Sequence
  Synthetic Oligonucleotide
cuauaugaagcaguugaggaaugcc

SEQ ID NO: 11471 - RNA, 25 nt, Artificial Sequence
  Synthetic Oligonucleotide
cuauaugaagcgauugaggagugcc

SEQ ID NO: 11472 - RNA, 25 nt, Artificial Sequence
  Synthetic Oligonucleotide
cuauaugaggcaauugaggagugcc

SEQ ID NO: 11473 - RNA, 25 nt, Artificial Sequence
  Synthetic Oligonucleotide
cuauaugaugcaauugaggagugcc

SEQ ID NO: 11474 - RNA, 25 nt, Artificial Sequence
  Synthetic Oligonucleotide
cuauaugaugcaauugaggagugug

SEQ ID NO: 11475 - RNA, 25 nt, Artificial Sequence
  Synthetic Oligonucleotide
cuauauggagcaauugaggagugcc

SEQ ID NO: 11476 - RNA, 25 nt, Artificial Sequence
  Synthetic Oligonucleotide
cuauacgaagcaauugaggagugcc

SEQ ID NO: 11477 - RNA, 25 nt, Artificial Sequence
  Synthetic Oligonucleotide
cuguaugaagcaauugaggagugcc

SEQ ID NO: 11478 - RNA, 25 nt, Artificial Sequence
  Synthetic Oligonucleotide
uuauaugaagcaauugaggagugcc

SEQ ID NO: 11479 - RNA, 25 nt, Artificial Sequence
  Synthetic Oligonucleotide
auaugaagcaauugaggagugccua

SEQ ID NO: 11480 - RNA, 25 nt, Artificial Sequence
  Synthetic Oligonucleotide
auaugaagcaauugaggaaugccug

SEQ ID NO: 11481 - RNA, 25 nt, Artificial Sequence
  Synthetic Oligonucleotide
auaugaagcaaucgaggagugccug

SEQ ID NO: 11482 - RNA, 25 nt, Artificial Sequence
  Synthetic Oligonucleotide
auaugaagcaguugaggagugccug

SEQ ID NO: 11483 - RNA, 25 nt, Artificial Sequence
  Synthetic Oligonucleotide
auaugaagcaguugaggagugccua

SEQ ID NO: 11484 - RNA, 25 nt, Artificial Sequence
  Synthetic Oligonucleotide
auaugaagcgauugaggagugccug

SEQ ID NO: 11485 - RNA, 25 nt, Artificial Sequence
  Synthetic Oligonucleotide
auaugaggcaauugaggagugccug

SEQ ID NO: 11486 - RNA, 25 nt, Artificial Sequence
  Synthetic Oligonucleotide
auaugaugcaauugaggagugccua

SEQ ID NO: 11487 - RNA, 25 nt, Artificial Sequence
  Synthetic Oligonucleotide
auaugaugcaauugaggaguguggg

SEQ ID NO: 11488 - RNA, 25 nt, Artificial Sequence
  Synthetic Oligonucleotide
auauggagcaauugaggagugccug

SEQ ID NO: 11489 - RNA, 25 nt, Artificial Sequence
  Synthetic Oligonucleotide
auacgaagcaauugaggagugccug

SEQ ID NO: 11490 - RNA, 25 nt, Artificial Sequence
  Synthetic Oligonucleotide
guaugaagcaauugaggagugccug

SEQ ID NO: 11491 - RNA, 25 nt, Artificial Sequence
  Synthetic Oligonucleotide
auaugaagcaguugaggaaugccug

SEQ ID NO: 11492 - RNA, 25 nt, Artificial Sequence
  Synthetic Oligonucleotide
gcuauaugaagcaauugaggaaugc

SEQ ID NO: 11493 - RNA, 25 nt, Artificial Sequence
  Synthetic Oligonucleotide
gcuauaugaagcaaucgaggagugc

SEQ ID NO: 11494 - RNA, 25 nt, Artificial Sequence
  Synthetic Oligonucleotide
gcuauaugaagcaguugaggagugc

SEQ ID NO: 11495 - RNA, 25 nt, Artificial Sequence
  Synthetic Oligonucleotide
gcuauaugaagcaguugaggaaugc

SEQ ID NO: 11496 - RNA, 25 nt, Artificial Sequence
  Synthetic Oligonucleotide
gcuauaugaagcgauugaggagugc

SEQ ID NO: 11497 - RNA, 25 nt, Artificial Sequence
  Synthetic Oligonucleotide
gcuauaugaggcaauugaggagugc

SEQ ID NO: 11498 - RNA, 25 nt, Artificial Sequence
  Synthetic Oligonucleotide
gcuauaugaugcaauugaggagugc

SEQ ID NO: 11499 - RNA, 25 nt, Artificial Sequence
  Synthetic Oligonucleotide
gcuauaugaugcaauugaggagugu

SEQ ID NO: 11500 - RNA, 25 nt, Artificial Sequence
  Synthetic Oligonucleotide
gcuauauggagcaauugaggagugc

SEQ ID NO: 11501 - RNA, 25 nt, Artificial Sequence
  Synthetic Oligonucleotide
gcuauacgaagcaauugaggagugc

SEQ ID NO: 11502 - RNA, 25 nt, Artificial Sequence
  Synthetic Oligonucleotide
gcuguaugaagcaauugaggagugc

SEQ ID NO: 11503 - RNA, 25 nt, Artificial Sequence
  Synthetic Oligonucleotide
guuauaugaagcaauugaggagugc

SEQ ID NO: 11504 - RNA, 25 nt, Artificial Sequence
  Synthetic Oligonucleotide
acuauaugaagcaauugaggagugc

SEQ ID NO: 11505 - RNA, 25 nt, Artificial Sequence
  Synthetic Oligonucleotide
auuauaugaagcaauugaggagugc

SEQ ID NO: 11506 - RNA, 25 nt, Artificial Sequence
  Synthetic Oligonucleotide
gggcuauaugaagcaauugaggaau

SEQ ID NO: 11507 - RNA, 25 nt, Artificial Sequence
  Synthetic Oligonucleotide
gggcuauaugaagcaaucgaggagu

SEQ ID NO: 11508 - RNA, 25 nt, Artificial Sequence
  Synthetic Oligonucleotide
gggcuauaugaagcaguugaggagu

SEQ ID NO: 11509 - RNA, 25 nt, Artificial Sequence
  Synthetic Oligonucleotide
gggcuauaugaagcaguugaggaau

SEQ ID NO: 11510 - RNA, 25 nt, Artificial Sequence
  Synthetic Oligonucleotide
gggcuauaugaagcgauugaggagu

SEQ ID NO: 11511 - RNA, 25 nt, Artificial Sequence
  Synthetic Oligonucleotide
gggcuauaugaggcaauugaggagu

SEQ ID NO: 11512 - RNA, 25 nt, Artificial Sequence
  Synthetic Oligonucleotide
gggcuauaugaugcaauugaggagu

SEQ ID NO: 11513 - RNA, 25 nt, Artificial Sequence
  Synthetic Oligonucleotide
gggcuauauggagcaauugaggagu

SEQ ID NO: 11514 - RNA, 25 nt, Artificial Sequence
  Synthetic Oligonucleotide
gggcuauacgaagcaauugaggagu

SEQ ID NO: 11515 - RNA, 25 nt, Artificial Sequence
  Synthetic Oligonucleotide
gggcuguaugaagcaauugaggagu

SEQ ID NO: 11516 - RNA, 25 nt, Artificial Sequence
  Synthetic Oligonucleotide
ggguuauaugaagcaauugaggagu

SEQ ID NO: 11517 - RNA, 25 nt, Artificial Sequence
  Synthetic Oligonucleotide
ggacuauaugaagcaauugaggagu

SEQ ID NO: 11518 - RNA, 25 nt, Artificial Sequence
  Synthetic Oligonucleotide
ggauuauaugaagcaauugaggagu

SEQ ID NO: 11519 - RNA, 25 nt, Artificial Sequence
  Synthetic Oligonucleotide
ggcuauaugaagcaauugaggaaug

SEQ ID NO: 11520 - RNA, 25 nt, Artificial Sequence
  Synthetic Oligonucleotide
ggcuauaugaagcaaucgaggagug

SEQ ID NO: 11521 - RNA, 25 nt, Artificial Sequence
  Synthetic Oligonucleotide
ggcuauaugaagcaguugaggagug

SEQ ID NO: 11522 - RNA, 25 nt, Artificial Sequence
  Synthetic Oligonucleotide
ggcuauaugaagcaguugaggaaug

SEQ ID NO: 11523 - RNA, 25 nt, Artificial Sequence
  Synthetic Oligonucleotide
ggcuauaugaagcgauugaggagug

SEQ ID NO: 11524 - RNA, 25 nt, Artificial Sequence
  Synthetic Oligonucleotide
ggcuauaugaggcaauugaggagug

SEQ ID NO: 11525 - RNA, 25 nt, Artificial Sequence
  Synthetic Oligonucleotide
ggcuauaugaugcaauugaggagug

SEQ ID NO: 11526 - RNA, 25 nt, Artificial Sequence
  Synthetic Oligonucleotide
ggcuauauggagcaauugaggagug

SEQ ID NO: 11527 - RNA, 25 nt, Artificial Sequence
  Synthetic Oligonucleotide
ggcuauacgaagcaauugaggagug

SEQ ID NO: 11528 - RNA, 25 nt, Artificial Sequence
  Synthetic Oligonucleotide
ggcuguaugaagcaauugaggagug

SEQ ID NO: 11529 - RNA, 25 nt, Artificial Sequence
  Synthetic Oligonucleotide
gguuauaugaagcaauugaggagug

SEQ ID NO: 11530 - RNA, 25 nt, Artificial Sequence
  Synthetic Oligonucleotide
gacuauaugaagcaauugaggagug

SEQ ID NO: 11531 - RNA, 25 nt, Artificial Sequence
  Synthetic Oligonucleotide
gauuauaugaagcaauugaggagug

SEQ ID NO: 11532 - RNA, 25 nt, Artificial Sequence
  Synthetic Oligonucleotide
auugagggcaagcuuucucagaugu

SEQ ID NO: 11533 - RNA, 25 nt, Artificial Sequence
  Synthetic Oligonucleotide
auugagggcaagcuuucacaaaugu

SEQ ID NO: 11534 - RNA, 25 nt, Artificial Sequence
  Synthetic Oligonucleotide
auugagggcaagcuuccucaaaugu

SEQ ID NO: 11535 - RNA, 25 nt, Artificial Sequence
  Synthetic Oligonucleotide
auugagggcaagcugucucaaaugu

SEQ ID NO: 11536 - RNA, 25 nt, Artificial Sequence
  Synthetic Oligonucleotide
auugagggcaaacuuucucaaaugu

SEQ ID NO: 11537 - RNA, 25 nt, Artificial Sequence
  Synthetic Oligonucleotide
auugaggguaagcuuucucaaaugu

SEQ ID NO: 11538 - RNA, 25 nt, Artificial Sequence
  Synthetic Oligonucleotide
auugaaggcaagcuuucucaaaugu

SEQ ID NO: 11539 - RNA, 25 nt, Artificial Sequence
  Synthetic Oligonucleotide
auagagggcaagcuuucucaaaugu

SEQ ID NO: 11540 - RNA, 25 nt, Artificial Sequence
  Synthetic Oligonucleotide
auugaggguaagcuuucacaaaugu

SEQ ID NO: 11541 - RNA, 25 nt, Artificial Sequence
  Synthetic Oligonucleotide
cauugagggcaagcuuucucagaug

SEQ ID NO: 11542 - RNA, 25 nt, Artificial Sequence
  Synthetic Oligonucleotide
cauugagggcaagcuuucacaaaug

SEQ ID NO: 11543 - RNA, 25 nt, Artificial Sequence
  Synthetic Oligonucleotide
cauugagggcaagcuuccucaaaug

SEQ ID NO: 11544 - RNA, 25 nt, Artificial Sequence
  Synthetic Oligonucleotide
cauugagggcaagcugucucaaaug

SEQ ID NO: 11545 - RNA, 25 nt, Artificial Sequence
  Synthetic Oligonucleotide
cauugagggcaaacuuucucaaaug

SEQ ID NO: 11546 - RNA, 25 nt, Artificial Sequence
  Synthetic Oligonucleotide
cauugaggguaagcuuucucaaaug

SEQ ID NO: 11547 - RNA, 25 nt, Artificial Sequence
  Synthetic Oligonucleotide
cauugaaggcaagcuuucucaaaug

SEQ ID NO: 11548 - RNA, 25 nt, Artificial Sequence
  Synthetic Oligonucleotide
cauagagggcaagcuuucucaaaug

SEQ ID NO: 11549 - RNA, 25 nt, Artificial Sequence
  Synthetic Oligonucleotide
cauugaggguaagcuuucacaaaug

SEQ ID NO: 11550 - RNA, 25 nt, Artificial Sequence
  Synthetic Oligonucleotide
uugagggcaagcuuucucaaaugua

SEQ ID NO: 11551 - RNA, 25 nt, Artificial Sequence
  Synthetic Oligonucleotide
uugagggcaagcuuucucaaauguu

SEQ ID NO: 11552 - RNA, 25 nt, Artificial Sequence
  Synthetic Oligonucleotide
uugagggcaagcuuucucagauguc

SEQ ID NO: 11553 - RNA, 25 nt, Artificial Sequence
  Synthetic Oligonucleotide
uugagggcaagcuuucacaaauguc

SEQ ID NO: 11554 - RNA, 25 nt, Artificial Sequence
  Synthetic Oligonucleotide
uugagggcaagcuuccucaaauguc

SEQ ID NO: 11555 - RNA, 25 nt, Artificial Sequence
  Synthetic Oligonucleotide
uugagggcaagcugucucaaauguc

SEQ ID NO: 11556 - RNA, 25 nt, Artificial Sequence
  Synthetic Oligonucleotide
uugagggcaaacuuucucaaauguc

SEQ ID NO: 11557 - RNA, 25 nt, Artificial Sequence
  Synthetic Oligonucleotide
uugaggguaagcuuucucaaauguc

SEQ ID NO: 11558 - RNA, 25 nt, Artificial Sequence
  Synthetic Oligonucleotide
uugaaggcaagcuuucucaaauguc

SEQ ID NO: 11559 - RNA, 25 nt, Artificial Sequence
  Synthetic Oligonucleotide
uagagggcaagcuuucucaaauguc

SEQ ID NO: 11560 - RNA, 25 nt, Artificial Sequence
  Synthetic Oligonucleotide
uugaggguaagcuuucacaaauguc

SEQ ID NO: 11561 - RNA, 25 nt, Artificial Sequence
  Synthetic Oligonucleotide
gccugauuaaugaucccuggguucu

SEQ ID NO: 11562 - RNA, 25 nt, Artificial Sequence
  Synthetic Oligonucleotide
gccugauuaaugaucccugggcuuu

SEQ ID NO: 11563 - RNA, 25 nt, Artificial Sequence
  Synthetic Oligonucleotide
gccugauuaaugauccuuggguuuu

SEQ ID NO: 11564 - RNA, 25 nt, Artificial Sequence
  Synthetic Oligonucleotide
gccugauuaaugaccccuggguuuu

SEQ ID NO: 11565 - RNA, 25 nt, Artificial Sequence
  Synthetic Oligonucleotide
gccugauuaacgaucccuggguuuu

SEQ ID NO: 11566 - RNA, 25 nt, Artificial Sequence
  Synthetic Oligonucleotide
gccugguuaaugaucccuggguuuu

SEQ ID NO: 11567 - RNA, 25 nt, Artificial Sequence
  Synthetic Oligonucleotide
gccuaauuaaugaucccuggguuuu

SEQ ID NO: 11568 - RNA, 25 nt, Artificial Sequence
  Synthetic Oligonucleotide
ugccugauuaaugaucccuggguuc

SEQ ID NO: 11569 - RNA, 25 nt, Artificial Sequence
  Synthetic Oligonucleotide
ugccugauuaaugaucccugggcuu

SEQ ID NO: 11570 - RNA, 25 nt, Artificial Sequence
  Synthetic Oligonucleotide
ugccugauuaaugauccuuggguuu

SEQ ID NO: 11571 - RNA, 25 nt, Artificial Sequence
  Synthetic Oligonucleotide
ugccugauuaaugaccccuggguuu

SEQ ID NO: 11572 - RNA, 25 nt, Artificial Sequence
  Synthetic Oligonucleotide
ugccugauuaacgaucccuggguuu

SEQ ID NO: 11573 - RNA, 25 nt, Artificial Sequence
  Synthetic Oligonucleotide
ugccugguuaaugaucccuggguuu

SEQ ID NO: 11574 - RNA, 25 nt, Artificial Sequence
  Synthetic Oligonucleotide
ugccuaauuaaugaucccuggguuu

SEQ ID NO: 11575 - RNA, 25 nt, Artificial Sequence
  Synthetic Oligonucleotide
ccugauuaaugaucccuggguucug

SEQ ID NO: 11576 - RNA, 25 nt, Artificial Sequence
  Synthetic Oligonucleotide
ccugauuaaugaucccugggcuuug

SEQ ID NO: 11577 - RNA, 25 nt, Artificial Sequence
  Synthetic Oligonucleotide
ccugauuaaugauccuuggguuuug

SEQ ID NO: 11578 - RNA, 25 nt, Artificial Sequence
  Synthetic Oligonucleotide
ccugauuaaugaccccuggguuuug

SEQ ID NO: 11579 - RNA, 25 nt, Artificial Sequence
  Synthetic Oligonucleotide
ccugauuaacgaucccuggguuuug

SEQ ID NO: 11580 - RNA, 25 nt, Artificial Sequence
  Synthetic Oligonucleotide
ccugguuaaugaucccuggguuuug

SEQ ID NO: 11581 - RNA, 25 nt, Artificial Sequence
  Synthetic Oligonucleotide
ccuaauuaaugaucccuggguuuug

SEQ ID NO: 11582 - RNA, 25 nt, Artificial Sequence
  Synthetic Oligonucleotide
ugauuaaugaucccuggguucugcu

SEQ ID NO: 11583 - RNA, 25 nt, Artificial Sequence
  Synthetic Oligonucleotide
ugauuaaugaucccugggcuuugcu

SEQ ID NO: 11584 - RNA, 25 nt, Artificial Sequence
  Synthetic Oligonucleotide
ugauuaaugauccuuggguuuugcu

SEQ ID NO: 11585 - RNA, 25 nt, Artificial Sequence
  Synthetic Oligonucleotide
ugauuaaugaccccuggguuuugcu

SEQ ID NO: 11586 - RNA, 25 nt, Artificial Sequence
  Synthetic Oligonucleotide
ugauuaacgaucccuggguuuugcu

SEQ ID NO: 11587 - RNA, 25 nt, Artificial Sequence
  Synthetic Oligonucleotide
ugguuaaugaucccuggguuuugcu

SEQ ID NO: 11588 - RNA, 25 nt, Artificial Sequence
  Synthetic Oligonucleotide
uaauuaaugaucccuggguuuugcu

SEQ ID NO: 11589 - RNA, 25 nt, Artificial Sequence
  Synthetic Oligonucleotide
cugauuaaugaucccuggguucugc

SEQ ID NO: 11590 - RNA, 25 nt, Artificial Sequence
  Synthetic Oligonucleotide
cugauuaaugaucccugggcuuugc

SEQ ID NO: 11591 - RNA, 25 nt, Artificial Sequence
  Synthetic Oligonucleotide
cugauuaaugauccuuggguuuugc

SEQ ID NO: 11592 - RNA, 25 nt, Artificial Sequence
  Synthetic Oligonucleotide
cugauuaaugaccccuggguuuugc

SEQ ID NO: 11593 - RNA, 25 nt, Artificial Sequence
  Synthetic Oligonucleotide
cugauuaacgaucccuggguuuugc

SEQ ID NO: 11594 - RNA, 25 nt, Artificial Sequence
  Synthetic Oligonucleotide
cugguuaaugaucccuggguuuugc

SEQ ID NO: 11595 - RNA, 25 nt, Artificial Sequence
  Synthetic Oligonucleotide
cuaauuaaugaucccuggguuuugc

SEQ ID NO: 11596 - RNA, 25 nt, Artificial Sequence
  Synthetic Oligonucleotide
gagugccugauuaaugauccuuggg

SEQ ID NO: 11597 - RNA, 25 nt, Artificial Sequence
  Synthetic Oligonucleotide
gagugccugauuaaugaccccuggg

SEQ ID NO: 11598 - RNA, 25 nt, Artificial Sequence
  Synthetic Oligonucleotide
gagugccugauuaacgaucccuggg

SEQ ID NO: 11599 - RNA, 25 nt, Artificial Sequence
  Synthetic Oligonucleotide
gagugccugguuaaugaucccuggg

SEQ ID NO: 11600 - RNA, 25 nt, Artificial Sequence
  Synthetic Oligonucleotide
gagugccuaauuaaugaucccuggg

SEQ ID NO: 11601 - RNA, 25 nt, Artificial Sequence
  Synthetic Oligonucleotide
gaaugccugauuaaugaucccuggg

SEQ ID NO: 11602 - RNA, 25 nt, Artificial Sequence
  Synthetic Oligonucleotide
gagugugggauuaaugaucccuggg

SEQ ID NO: 11603 - RNA, 25 nt, Artificial Sequence
  Synthetic Oligonucleotide
gaggagugccugauuaaugauccuu

SEQ ID NO: 11604 - RNA, 25 nt, Artificial Sequence
  Synthetic Oligonucleotide
gaggagugccugauuaaugaccccu

SEQ ID NO: 11605 - RNA, 25 nt, Artificial Sequence
  Synthetic Oligonucleotide
gaggagugccugauuaacgaucccu

SEQ ID NO: 11606 - RNA, 25 nt, Artificial Sequence
  Synthetic Oligonucleotide
gaggagugccugguuaaugaucccu

SEQ ID NO: 11607 - RNA, 25 nt, Artificial Sequence
  Synthetic Oligonucleotide
gaggagugccuaauuaaugaucccu

SEQ ID NO: 11608 - RNA, 25 nt, Artificial Sequence
  Synthetic Oligonucleotide
gaggaaugccugauuaaugaucccu

SEQ ID NO: 11609 - RNA, 25 nt, Artificial Sequence
  Synthetic Oligonucleotide
gaggagugugggauuaaugaucccu

SEQ ID NO: 11610 - RNA, 25 nt, Artificial Sequence
  Synthetic Oligonucleotide
aggagugccugauuaaugauccuug

SEQ ID NO: 11611 - RNA, 25 nt, Artificial Sequence
  Synthetic Oligonucleotide
aggagugccugauuaaugaccccug

SEQ ID NO: 11612 - RNA, 25 nt, Artificial Sequence
  Synthetic Oligonucleotide
aggagugccugauuaacgaucccug

SEQ ID NO: 11613 - RNA, 25 nt, Artificial Sequence
  Synthetic Oligonucleotide
aggagugccugguuaaugaucccug

SEQ ID NO: 11614 - RNA, 25 nt, Artificial Sequence
  Synthetic Oligonucleotide
aggagugccuaauuaaugaucccug

SEQ ID NO: 11615 - RNA, 25 nt, Artificial Sequence
  Synthetic Oligonucleotide
aggaaugccugauuaaugaucccug

SEQ ID NO: 11616 - RNA, 25 nt, Artificial Sequence
  Synthetic Oligonucleotide
aggagugugggauuaaugaucccug

SEQ ID NO: 11617 - RNA, 25 nt, Artificial Sequence
  Synthetic Oligonucleotide
ggagugccugauuaaugauccuugg

SEQ ID NO: 11618 - RNA, 25 nt, Artificial Sequence
  Synthetic Oligonucleotide
ggagugccugauuaaugaccccugg

SEQ ID NO: 11619 - RNA, 25 nt, Artificial Sequence
  Synthetic Oligonucleotide
ggagugccugauuaacgaucccugg

SEQ ID NO: 11620 - RNA, 25 nt, Artificial Sequence
  Synthetic Oligonucleotide
ggagugccugguuaaugaucccugg

SEQ ID NO: 11621 - RNA, 25 nt, Artificial Sequence
  Synthetic Oligonucleotide
ggagugccuaauuaaugaucccugg

SEQ ID NO: 11622 - RNA, 25 nt, Artificial Sequence
  Synthetic Oligonucleotide
ggaaugccugauuaaugaucccugg

SEQ ID NO: 11623 - RNA, 25 nt, Artificial Sequence
  Synthetic Oligonucleotide
ggagugugggauuaaugaucccugg

SEQ ID NO: 11624 - RNA, 25 nt, Artificial Sequence
  Synthetic Oligonucleotide
agugccugauuaaugaucccugggc

SEQ ID NO: 11625 - RNA, 25 nt, Artificial Sequence
  Synthetic Oligonucleotide
agugccugauuaaugauccuugggu

SEQ ID NO: 11626 - RNA, 25 nt, Artificial Sequence
  Synthetic Oligonucleotide
agugccugauuaaugaccccugggu

SEQ ID NO: 11627 - RNA, 25 nt, Artificial Sequence
  Synthetic Oligonucleotide
agugccugauuaacgaucccugggu

SEQ ID NO: 11628 - RNA, 25 nt, Artificial Sequence
  Synthetic Oligonucleotide
agugccugguuaaugaucccugggu

SEQ ID NO: 11629 - RNA, 25 nt, Artificial Sequence
  Synthetic Oligonucleotide
agugccuaauuaaugaucccugggu

SEQ ID NO: 11630 - RNA, 25 nt, Artificial Sequence
  Synthetic Oligonucleotide
aaugccugauuaaugaucccugggu

SEQ ID NO: 11631 - RNA, 25 nt, Artificial Sequence
  Synthetic Oligonucleotide
agugugggauuaaugaucccugggu

SEQ ID NO: 11632 - RNA, 25 nt, Artificial Sequence
  Synthetic Oligonucleotide
uugaggagugccugauuaaugaccc

SEQ ID NO: 11633 - RNA, 25 nt, Artificial Sequence
  Synthetic Oligonucleotide
uugaggagugccugauuaacgaucc

SEQ ID NO: 11634 - RNA, 25 nt, Artificial Sequence
  Synthetic Oligonucleotide
uugaggagugccugguuaaugaucc

SEQ ID NO: 11635 - RNA, 25 nt, Artificial Sequence
  Synthetic Oligonucleotide
uugaggagugccuaauuaaugaucc

SEQ ID NO: 11636 - RNA, 25 nt, Artificial Sequence
  Synthetic Oligonucleotide
uugaggaaugccugauuaaugaucc

SEQ ID NO: 11637 - RNA, 25 nt, Artificial Sequence
  Synthetic Oligonucleotide
ucgaggagugccugauuaaugaucc

SEQ ID NO: 11638 - RNA, 25 nt, Artificial Sequence
  Synthetic Oligonucleotide
uugaggagugugggauuaaugaucc

SEQ ID NO: 11639 - RNA, 25 nt, Artificial Sequence
  Synthetic Oligonucleotide
gugccugauuaaugaucccugggcu

SEQ ID NO: 11640 - RNA, 25 nt, Artificial Sequence
  Synthetic Oligonucleotide
gugccugauuaaugauccuuggguu

SEQ ID NO: 11641 - RNA, 25 nt, Artificial Sequence
  Synthetic Oligonucleotide
gugccugauuaaugaccccuggguu

SEQ ID NO: 11642 - RNA, 25 nt, Artificial Sequence
  Synthetic Oligonucleotide
gugccugauuaacgaucccuggguu

SEQ ID NO: 11643 - RNA, 25 nt, Artificial Sequence
  Synthetic Oligonucleotide
gugccugguuaaugaucccuggguu

SEQ ID NO: 11644 - RNA, 25 nt, Artificial Sequence
  Synthetic Oligonucleotide
gugccuaauuaaugaucccuggguu

SEQ ID NO: 11645 - RNA, 25 nt, Artificial Sequence
  Synthetic Oligonucleotide
augccugauuaaugaucccuggguu

SEQ ID NO: 11646 - RNA, 25 nt, Artificial Sequence
  Synthetic Oligonucleotide
ugaggagugccugauuaaugauccu

SEQ ID NO: 11647 - RNA, 25 nt, Artificial Sequence
  Synthetic Oligonucleotide
ugaggagugccugauuaaugacccc

SEQ ID NO: 11648 - RNA, 25 nt, Artificial Sequence
  Synthetic Oligonucleotide
ugaggagugccugauuaacgauccc

SEQ ID NO: 11649 - RNA, 25 nt, Artificial Sequence
  Synthetic Oligonucleotide
ugaggagugccugguuaaugauccc

SEQ ID NO: 11650 - RNA, 25 nt, Artificial Sequence
  Synthetic Oligonucleotide
ugaggagugccuaauuaaugauccc

SEQ ID NO: 11651 - RNA, 25 nt, Artificial Sequence
  Synthetic Oligonucleotide
ugaggaaugccugauuaaugauccc

SEQ ID NO: 11652 - RNA, 25 nt, Artificial Sequence
  Synthetic Oligonucleotide
cgaggagugccugauuaaugauccc

SEQ ID NO: 11653 - RNA, 25 nt, Artificial Sequence
  Synthetic Oligonucleotide
ugaggagugugggauuaaugauccc

SEQ ID NO: 11654 - RNA, 25 nt, Artificial Sequence
  Synthetic Oligonucleotide
caauugaggagugccugauuaacga

SEQ ID NO: 11655 - RNA, 25 nt, Artificial Sequence
  Synthetic Oligonucleotide
caauugaggagugccugguuaauga

SEQ ID NO: 11656 - RNA, 25 nt, Artificial Sequence
  Synthetic Oligonucleotide
caauugaggagugccuaauuaauga

SEQ ID NO: 11657 - RNA, 25 nt, Artificial Sequence
  Synthetic Oligonucleotide
caauugaggaaugccugauuaauga

SEQ ID NO: 11658 - RNA, 25 nt, Artificial Sequence
  Synthetic Oligonucleotide
caaucgaggagugccugauuaauga

SEQ ID NO: 11659 - RNA, 25 nt, Artificial Sequence
  Synthetic Oligonucleotide
caguugaggagugccugauuaauga

SEQ ID NO: 11660 - RNA, 25 nt, Artificial Sequence
  Synthetic Oligonucleotide
cgauugaggagugccugauuaacga

SEQ ID NO: 11661 - RNA, 25 nt, Artificial Sequence
  Synthetic Oligonucleotide
caguugaggagugccuaauuaauga

SEQ ID NO: 11662 - RNA, 25 nt, Artificial Sequence
  Synthetic Oligonucleotide
caguugaggaaugccugauuaauga

SEQ ID NO: 11663 - RNA, 25 nt, Artificial Sequence
  Synthetic Oligonucleotide
caauugaggagugugggauuaauga

SEQ ID NO: 11664 - RNA, 25 nt, Artificial Sequence
  Synthetic Oligonucleotide
gcaauugaggagugccugauuaacg

SEQ ID NO: 11665 - RNA, 25 nt, Artificial Sequence
  Synthetic Oligonucleotide
gcaauugaggagugccugguuaaug

SEQ ID NO: 11666 - RNA, 25 nt, Artificial Sequence
  Synthetic Oligonucleotide
gcaauugaggagugccuaauuaaug

SEQ ID NO: 11667 - RNA, 25 nt, Artificial Sequence
  Synthetic Oligonucleotide
gcaauugaggaaugccugauuaaug

SEQ ID NO: 11668 - RNA, 25 nt, Artificial Sequence
  Synthetic Oligonucleotide
gcaaucgaggagugccugauuaaug

SEQ ID NO: 11669 - RNA, 25 nt, Artificial Sequence
  Synthetic Oligonucleotide
gcaguugaggagugccugauuaaug

SEQ ID NO: 11670 - RNA, 25 nt, Artificial Sequence
  Synthetic Oligonucleotide
gcgauugaggagugccugauuaacg

SEQ ID NO: 11671 - RNA, 25 nt, Artificial Sequence
  Synthetic Oligonucleotide
gcaguugaggagugccuaauuaaug

SEQ ID NO: 11672 - RNA, 25 nt, Artificial Sequence
  Synthetic Oligonucleotide
gcaguugaggaaugccugauuaaug

SEQ ID NO: 11673 - RNA, 25 nt, Artificial Sequence
  Synthetic Oligonucleotide
gcaauugaggagugugggauuaaug

SEQ ID NO: 11674 - RNA, 25 nt, Artificial Sequence
  Synthetic Oligonucleotide
agcaauugaggagugccugauuaac

SEQ ID NO: 11675 - RNA, 25 nt, Artificial Sequence
  Synthetic Oligonucleotide
agcaauugaggagugccugguuaau

SEQ ID NO: 11676 - RNA, 25 nt, Artificial Sequence
  Synthetic Oligonucleotide
agcaauugaggagugccuaauuaau

SEQ ID NO: 11677 - RNA, 25 nt, Artificial Sequence
  Synthetic Oligonucleotide
agcaauugaggaaugccugauuaau

SEQ ID NO: 11678 - RNA, 25 nt, Artificial Sequence
  Synthetic Oligonucleotide
agcaaucgaggagugccugauuaau

SEQ ID NO: 11679 - RNA, 25 nt, Artificial Sequence
  Synthetic Oligonucleotide
agcaguugaggagugccugauuaau

SEQ ID NO: 11680 - RNA, 25 nt, Artificial Sequence
  Synthetic Oligonucleotide
agcgauugaggagugccugauuaac

SEQ ID NO: 11681 - RNA, 25 nt, Artificial Sequence
  Synthetic Oligonucleotide
ggcaauugaggagugccugauuaau

SEQ ID NO: 11682 - RNA, 25 nt, Artificial Sequence
  Synthetic Oligonucleotide
agcaguugaggagugccuaauuaau

SEQ ID NO: 11683 - RNA, 25 nt, Artificial Sequence
  Synthetic Oligonucleotide
agcaguugaggaaugccugauuaau

SEQ ID NO: 11684 - RNA, 25 nt, Artificial Sequence
  Synthetic Oligonucleotide
ugcaauugaggagugccuaauuaau

SEQ ID NO: 11685 - RNA, 25 nt, Artificial Sequence
  Synthetic Oligonucleotide
aauugaggagugccugauuaaugac

SEQ ID NO: 11686 - RNA, 25 nt, Artificial Sequence
  Synthetic Oligonucleotide
aauugaggagugccugauuaacgau

SEQ ID NO: 11687 - RNA, 25 nt, Artificial Sequence
  Synthetic Oligonucleotide
aauugaggagugccugguuaaugau

SEQ ID NO: 11688 - RNA, 25 nt, Artificial Sequence
  Synthetic Oligonucleotide
aauugaggagugccuaauuaaugau

SEQ ID NO: 11689 - RNA, 25 nt, Artificial Sequence
  Synthetic Oligonucleotide
aauugaggaaugccugauuaaugau

SEQ ID NO: 11690 - RNA, 25 nt, Artificial Sequence
  Synthetic Oligonucleotide
aaucgaggagugccugauuaaugau

SEQ ID NO: 11691 - RNA, 25 nt, Artificial Sequence
  Synthetic Oligonucleotide
aguugaggagugccugauuaaugau

SEQ ID NO: 11692 - RNA, 25 nt, Artificial Sequence
  Synthetic Oligonucleotide
gauugaggagugccugauuaacgau

SEQ ID NO: 11693 - RNA, 25 nt, Artificial Sequence
  Synthetic Oligonucleotide
aguugaggagugccuaauuaaugau

SEQ ID NO: 11694 - RNA, 25 nt, Artificial Sequence
  Synthetic Oligonucleotide
aguugaggaaugccugauuaaugau

SEQ ID NO: 11695 - RNA, 25 nt, Artificial Sequence
  Synthetic Oligonucleotide
aauugaggagugugggauuaaugau

SEQ ID NO: 11696 - RNA, 25 nt, Artificial Sequence
  Synthetic Oligonucleotide
auugaggagugccugauuaaugacc

SEQ ID NO: 11697 - RNA, 25 nt, Artificial Sequence
  Synthetic Oligonucleotide
auugaggagugccugauuaacgauc

SEQ ID NO: 11698 - RNA, 25 nt, Artificial Sequence
  Synthetic Oligonucleotide
auugaggagugccugguuaaugauc

SEQ ID NO: 11699 - RNA, 25 nt, Artificial Sequence
  Synthetic Oligonucleotide
auugaggagugccuaauuaaugauc

SEQ ID NO: 11700 - RNA, 25 nt, Artificial Sequence
  Synthetic Oligonucleotide
auugaggaaugccugauuaaugauc

SEQ ID NO: 11701 - RNA, 25 nt, Artificial Sequence
  Synthetic Oligonucleotide
aucgaggagugccugauuaaugauc

SEQ ID NO: 11702 - RNA, 25 nt, Artificial Sequence
  Synthetic Oligonucleotide
guugaggagugccugauuaaugauc

SEQ ID NO: 11703 - RNA, 25 nt, Artificial Sequence
  Synthetic Oligonucleotide
guugaggagugccuaauuaaugauc

SEQ ID NO: 11704 - RNA, 25 nt, Artificial Sequence
  Synthetic Oligonucleotide
guugaggaaugccugauuaaugauc

SEQ ID NO: 11705 - RNA, 25 nt, Artificial Sequence
  Synthetic Oligonucleotide
auugaggagugugggauuaaugauc

SEQ ID NO: 11706 - RNA, 25 nt, Artificial Sequence
  Synthetic Oligonucleotide
aauuuuagagccuauguggaugggu

SEQ ID NO: 11707 - RNA, 25 nt, Artificial Sequence
  Synthetic Oligonucleotide
aauuuuagagccuauguggauagau

SEQ ID NO: 11708 - RNA, 25 nt, Artificial Sequence
  Synthetic Oligonucleotide
aauuuuagagccuauguagauggau

SEQ ID NO: 11709 - RNA, 25 nt, Artificial Sequence
  Synthetic Oligonucleotide
aauuuuagaaccuauguggauggau

SEQ ID NO: 11710 - RNA, 25 nt, Artificial Sequence
  Synthetic Oligonucleotide
aauuuuaaagccuauguggauggau

SEQ ID NO: 11711 - RNA, 25 nt, Artificial Sequence
  Synthetic Oligonucleotide
aaauuuagagccuauguggauggau

SEQ ID NO: 11712 - RNA, 25 nt, Artificial Sequence
  Synthetic Oligonucleotide
aacuuuagagccuauguggauggau

SEQ ID NO: 11713 - RNA, 25 nt, Artificial Sequence
  Synthetic Oligonucleotide
aacuuuagagccuauguggaugggu

SEQ ID NO: 11714 - RNA, 25 nt, Artificial Sequence
  Synthetic Oligonucleotide
aguuuuagagccuauguggauggau

SEQ ID NO: 11715 - RNA, 25 nt, Artificial Sequence
  Synthetic Oligonucleotide
auuuuuagagccuauguggauggau

SEQ ID NO: 11716 - RNA, 25 nt, Artificial Sequence
  Synthetic Oligonucleotide
aacuuuagagccuauguagaugggu

SEQ ID NO: 11717 - RNA, 25 nt, Artificial Sequence
  Synthetic Oligonucleotide
aacuuuagagcauauguggauggau

SEQ ID NO: 11718 - RNA, 25 nt, Artificial Sequence
  Synthetic Oligonucleotide
aacuuuagaaccuauguggauggau

SEQ ID NO: 11719 - RNA, 25 nt, Artificial Sequence
  Synthetic Oligonucleotide
accuuuagagccuauguggauggau

SEQ ID NO: 11720 - RNA, 25 nt, Artificial Sequence
  Synthetic Oligonucleotide
auuuuagagccuauguggauggaua

SEQ ID NO: 11721 - RNA, 25 nt, Artificial Sequence
  Synthetic Oligonucleotide
auuuuagagccuauguggauggguu

SEQ ID NO: 11722 - RNA, 25 nt, Artificial Sequence
  Synthetic Oligonucleotide
auuuuagagccuauguggauagauu

SEQ ID NO: 11723 - RNA, 25 nt, Artificial Sequence
  Synthetic Oligonucleotide
auuuuagagccuauguagauggauu

SEQ ID NO: 11724 - RNA, 25 nt, Artificial Sequence
  Synthetic Oligonucleotide
auuuuagaaccuauguggauggauu

SEQ ID NO: 11725 - RNA, 25 nt, Artificial Sequence
  Synthetic Oligonucleotide
auuuuaaagccuauguggauggauu

SEQ ID NO: 11726 - RNA, 25 nt, Artificial Sequence
  Synthetic Oligonucleotide
aauuuagagccuauguggauggauu

SEQ ID NO: 11727 - RNA, 25 nt, Artificial Sequence
  Synthetic Oligonucleotide
acuuuagagccuauguggauggauu

SEQ ID NO: 11728 - RNA, 25 nt, Artificial Sequence
  Synthetic Oligonucleotide
acuuuagagccuauguggauggguu

SEQ ID NO: 11729 - RNA, 25 nt, Artificial Sequence
  Synthetic Oligonucleotide
guuuuagagccuauguggauggauu

SEQ ID NO: 11730 - RNA, 25 nt, Artificial Sequence
  Synthetic Oligonucleotide
uuuuuagagccuauguggauggauu

SEQ ID NO: 11731 - RNA, 25 nt, Artificial Sequence
  Synthetic Oligonucleotide
acuuuagagccuauguagauggguu

SEQ ID NO: 11732 - RNA, 25 nt, Artificial Sequence
  Synthetic Oligonucleotide
acuuuagagcauauguggauggauu

SEQ ID NO: 11733 - RNA, 25 nt, Artificial Sequence
  Synthetic Oligonucleotide
acuuuagaaccuauguggauggauu

SEQ ID NO: 11734 - RNA, 25 nt, Artificial Sequence
  Synthetic Oligonucleotide
ccuuuagagccuauguggauggauu

SEQ ID NO: 11735 - RNA, 25 nt, Artificial Sequence
  Synthetic Oligonucleotide
agaauuuuagagccuauguggauag

SEQ ID NO: 11736 - RNA, 25 nt, Artificial Sequence
  Synthetic Oligonucleotide
agaauuuuagagccuauguagaugg

SEQ ID NO: 11737 - RNA, 25 nt, Artificial Sequence
  Synthetic Oligonucleotide
agaauuuuagaaccuauguggaugg

SEQ ID NO: 11738 - RNA, 25 nt, Artificial Sequence
  Synthetic Oligonucleotide
agaauuuuaaagccuauguggaugg

SEQ ID NO: 11739 - RNA, 25 nt, Artificial Sequence
  Synthetic Oligonucleotide
agaacuuuagagccuauguggaugg

SEQ ID NO: 11740 - RNA, 25 nt, Artificial Sequence
  Synthetic Oligonucleotide
agaguuuuagagccuauguggaugg

SEQ ID NO: 11741 - RNA, 25 nt, Artificial Sequence
  Synthetic Oligonucleotide
agauuuuuagagccuauguggaugg

SEQ ID NO: 11742 - RNA, 25 nt, Artificial Sequence
  Synthetic Oligonucleotide
aaaauuuuagagccuauguggaugg

SEQ ID NO: 11743 - RNA, 25 nt, Artificial Sequence
  Synthetic Oligonucleotide
agaacuuuagagcauauguggaugg

SEQ ID NO: 11744 - RNA, 25 nt, Artificial Sequence
  Synthetic Oligonucleotide
aaaaauuuagagccuauguggaugg

SEQ ID NO: 11745 - RNA, 25 nt, Artificial Sequence
  Synthetic Oligonucleotide
aaaacuuuagagccuauguggaugg

SEQ ID NO: 11746 - RNA, 25 nt, Artificial Sequence
  Synthetic Oligonucleotide
aaaacuuuagagccuauguagaugg

SEQ ID NO: 11747 - RNA, 25 nt, Artificial Sequence
  Synthetic Oligonucleotide
aaaacuuuagaaccuauguggaugg

SEQ ID NO: 11748 - RNA, 25 nt, Artificial Sequence
  Synthetic Oligonucleotide
aaaccuuuagagccuauguggaugg

SEQ ID NO: 11749 - RNA, 25 nt, Artificial Sequence
  Synthetic Oligonucleotide
ugagaauuuuagagccuauguagau

SEQ ID NO: 11750 - RNA, 25 nt, Artificial Sequence
  Synthetic Oligonucleotide
ugagaauuuuagaaccuauguggau

SEQ ID NO: 11751 - RNA, 25 nt, Artificial Sequence
  Synthetic Oligonucleotide
ugagaauuuuaaagccuauguggau

SEQ ID NO: 11752 - RNA, 25 nt, Artificial Sequence
  Synthetic Oligonucleotide
ugagaacuuuagagccuauguggau

SEQ ID NO: 11753 - RNA, 25 nt, Artificial Sequence
  Synthetic Oligonucleotide
ugagaguuuuagagccuauguggau

SEQ ID NO: 11754 - RNA, 25 nt, Artificial Sequence
  Synthetic Oligonucleotide
ugagauuuuuagagccuauguggau

SEQ ID NO: 11755 - RNA, 25 nt, Artificial Sequence
  Synthetic Oligonucleotide
ugaaaauuuuagagccuauguggau

SEQ ID NO: 11756 - RNA, 25 nt, Artificial Sequence
  Synthetic Oligonucleotide
uaagaauuuuagagccuauguggau

SEQ ID NO: 11757 - RNA, 25 nt, Artificial Sequence
  Synthetic Oligonucleotide
agagaauuuuagagccuauguggau

SEQ ID NO: 11758 - RNA, 25 nt, Artificial Sequence
  Synthetic Oligonucleotide
ugagaacuuuagagcauauguggau

SEQ ID NO: 11759 - RNA, 25 nt, Artificial Sequence
  Synthetic Oligonucleotide
ugaaaaauuuagagccuauguggau

SEQ ID NO: 11760 - RNA, 25 nt, Artificial Sequence
  Synthetic Oligonucleotide
ugaaaacuuuagagccuauguggau

SEQ ID NO: 11761 - RNA, 25 nt, Artificial Sequence
  Synthetic Oligonucleotide
ugaaaacuuuagagccuauguagau

SEQ ID NO: 11762 - RNA, 25 nt, Artificial Sequence
  Synthetic Oligonucleotide
ugaaaacuuuagaaccuauguggau

SEQ ID NO: 11763 - RNA, 25 nt, Artificial Sequence
  Synthetic Oligonucleotide
ugaaaccuuuagagccuauguggau

SEQ ID NO: 11764 - RNA, 25 nt, Artificial Sequence
  Synthetic Oligonucleotide
uugagaauuuuagagccuauguaga

SEQ ID NO: 11765 - RNA, 25 nt, Artificial Sequence
  Synthetic Oligonucleotide
uugagaauuuuagaaccuaugugga

SEQ ID NO: 11766 - RNA, 25 nt, Artificial Sequence
  Synthetic Oligonucleotide
uugagaauuuuaaagccuaugugga

SEQ ID NO: 11767 - RNA, 25 nt, Artificial Sequence
  Synthetic Oligonucleotide
uugagaacuuuagagccuaugugga

SEQ ID NO: 11768 - RNA, 25 nt, Artificial Sequence
  Synthetic Oligonucleotide
uugagaguuuuagagccuaugugga

SEQ ID NO: 11769 - RNA, 25 nt, Artificial Sequence
  Synthetic Oligonucleotide
uugagauuuuuagagccuaugugga

SEQ ID NO: 11770 - RNA, 25 nt, Artificial Sequence
  Synthetic Oligonucleotide
uugaaaauuuuagagccuaugugga

SEQ ID NO: 11771 - RNA, 25 nt, Artificial Sequence
  Synthetic Oligonucleotide
uuaagaauuuuagagccuaugugga

SEQ ID NO: 11772 - RNA, 25 nt, Artificial Sequence
  Synthetic Oligonucleotide
uagagaauuuuagagccuaugugga

SEQ ID NO: 11773 - RNA, 25 nt, Artificial Sequence
  Synthetic Oligonucleotide
uugagaacuuuagagcauaugugga

SEQ ID NO: 11774 - RNA, 25 nt, Artificial Sequence
  Synthetic Oligonucleotide
uugaaaaauuuagagccuaugugga

SEQ ID NO: 11775 - RNA, 25 nt, Artificial Sequence
  Synthetic Oligonucleotide
uugaaaacuuuagagccuaugugga

SEQ ID NO: 11776 - RNA, 25 nt, Artificial Sequence
  Synthetic Oligonucleotide
uugaaaacuuuagagccuauguaga

SEQ ID NO: 11777 - RNA, 25 nt, Artificial Sequence
  Synthetic Oligonucleotide
uugaaaacuuuagaaccuaugugga

SEQ ID NO: 11778 - RNA, 25 nt, Artificial Sequence
  Synthetic Oligonucleotide
uugaaaccuuuagagccuaugugga

SEQ ID NO: 11779 - RNA, 25 nt, Artificial Sequence
  Synthetic Oligonucleotide
gagaauuuuagagccuauguggaua

SEQ ID NO: 11780 - RNA, 25 nt, Artificial Sequence
  Synthetic Oligonucleotide
gagaauuuuagagccuauguagaug

SEQ ID NO: 11781 - RNA, 25 nt, Artificial Sequence
  Synthetic Oligonucleotide
gagaauuuuagaaccuauguggaug

SEQ ID NO: 11782 - RNA, 25 nt, Artificial Sequence
  Synthetic Oligonucleotide
gagaauuuuaaagccuauguggaug

SEQ ID NO: 11783 - RNA, 25 nt, Artificial Sequence
  Synthetic Oligonucleotide
gagaacuuuagagccuauguggaug

SEQ ID NO: 11784 - RNA, 25 nt, Artificial Sequence
  Synthetic Oligonucleotide
gagaguuuuagagccuauguggaug

SEQ ID NO: 11785 - RNA, 25 nt, Artificial Sequence
  Synthetic Oligonucleotide
gagauuuuuagagccuauguggaug

SEQ ID NO: 11786 - RNA, 25 nt, Artificial Sequence
  Synthetic Oligonucleotide
gaaaauuuuagagccuauguggaug

SEQ ID NO: 11787 - RNA, 25 nt, Artificial Sequence
  Synthetic Oligonucleotide
aagaauuuuagagccuauguggaug

SEQ ID NO: 11788 - RNA, 25 nt, Artificial Sequence
  Synthetic Oligonucleotide
gagaacuuuagagcauauguggaug

SEQ ID NO: 11789 - RNA, 25 nt, Artificial Sequence
  Synthetic Oligonucleotide
gaaaaauuuagagccuauguggaug

SEQ ID NO: 11790 - RNA, 25 nt, Artificial Sequence
  Synthetic Oligonucleotide
gaaaacuuuagagccuauguggaug

SEQ ID NO: 11791 - RNA, 25 nt, Artificial Sequence
  Synthetic Oligonucleotide
gaaaacuuuagagccuauguagaug

SEQ ID NO: 11792 - RNA, 25 nt, Artificial Sequence
  Synthetic Oligonucleotide
gaaaacuuuagaaccuauguggaug

SEQ ID NO: 11793 - RNA, 25 nt, Artificial Sequence
  Synthetic Oligonucleotide
gaaaccuuuagagccuauguggaug

SEQ ID NO: 11794 - RNA, 25 nt, Artificial Sequence
  Synthetic Oligonucleotide
acaaacaaauuugcagcaauaugua

SEQ ID NO: 11795 - RNA, 25 nt, Artificial Sequence
  Synthetic Oligonucleotide
acaaacaaauuugcggcaauaugca

SEQ ID NO: 11796 - RNA, 25 nt, Artificial Sequence
  Synthetic Oligonucleotide
acaaacaaauuugcugcaauaugca

SEQ ID NO: 11797 - RNA, 25 nt, Artificial Sequence
  Synthetic Oligonucleotide
acaaacaaauuugcugcaauaugua

SEQ ID NO: 11798 - RNA, 25 nt, Artificial Sequence
  Synthetic Oligonucleotide
acaaacaaauucgcagcaauaugca

SEQ ID NO: 11799 - RNA, 25 nt, Artificial Sequence
  Synthetic Oligonucleotide
acaaacaaacuugcagcaauaugca

SEQ ID NO: 11800 - RNA, 25 nt, Artificial Sequence
  Synthetic Oligonucleotide
acaaauaaauuugcagcaauaugca

SEQ ID NO: 11801 - RNA, 25 nt, Artificial Sequence
  Synthetic Oligonucleotide
acgaacaaauuugcagcaauaugca

SEQ ID NO: 11802 - RNA, 25 nt, Artificial Sequence
  Synthetic Oligonucleotide
acuaacaaauuugcagcaauaugca

SEQ ID NO: 11803 - RNA, 25 nt, Artificial Sequence
  Synthetic Oligonucleotide
acgaacaaauuugccgcaauaugca

SEQ ID NO: 11804 - RNA, 25 nt, Artificial Sequence
  Synthetic Oligonucleotide
acgaacaaauuugcugcaauaugca

SEQ ID NO: 11805 - RNA, 25 nt, Artificial Sequence
  Synthetic Oligonucleotide
acaaacaaguucgcugcaauaugca

SEQ ID NO: 11806 - RNA, 25 nt, Artificial Sequence
  Synthetic Oligonucleotide
accaacaaauucgcugcaauaugca

SEQ ID NO: 11807 - RNA, 25 nt, Artificial Sequence
  Synthetic Oligonucleotide
acgaacaaauucgccgcaauaugca

SEQ ID NO: 11808 - RNA, 25 nt, Artificial Sequence
  Synthetic Oligonucleotide
acgaacaaguuugcugcaauaugca

SEQ ID NO: 11809 - RNA, 25 nt, Artificial Sequence
  Synthetic Oligonucleotide
aagauuuugugcgacaaugcuuuaa

SEQ ID NO: 11810 - RNA, 25 nt, Artificial Sequence
  Synthetic Oligonucleotide
aagauuuugugcgacaauguuucaa

SEQ ID NO: 11811 - RNA, 25 nt, Artificial Sequence
  Synthetic Oligonucleotide
aagauuuugugcgacagugcuucaa

SEQ ID NO: 11812 - RNA, 25 nt, Artificial Sequence
  Synthetic Oligonucleotide
aagauuuugugcggcaaugcuucaa

SEQ ID NO: 11813 - RNA, 25 nt, Artificial Sequence
  Synthetic Oligonucleotide
aagauuuugugagacaaugcuucaa

SEQ ID NO: 11814 - RNA, 25 nt, Artificial Sequence
  Synthetic Oligonucleotide
aagauuuugugggacaaugcuucaa

SEQ ID NO: 11815 - RNA, 25 nt, Artificial Sequence
  Synthetic Oligonucleotide
aagauuuuguacgacaaugcuuuaa

SEQ ID NO: 11816 - RNA, 25 nt, Artificial Sequence
  Synthetic Oligonucleotide
aagauuucgugcgacaaugcuucaa

SEQ ID NO: 11817 - RNA, 25 nt, Artificial Sequence
  Synthetic Oligonucleotide
aagaucuugugcgacaaugcuucaa

SEQ ID NO: 11818 - RNA, 25 nt, Artificial Sequence
  Synthetic Oligonucleotide
aagaauuugugcgacaaugcuucaa

SEQ ID NO: 11819 - RNA, 25 nt, Artificial Sequence
  Synthetic Oligonucleotide
aagacuuugugcgacaaugcuucaa

SEQ ID NO: 11820 - RNA, 25 nt, Artificial Sequence
  Synthetic Oligonucleotide
aagacuuugugcgacaaugcuucau

SEQ ID NO: 11821 - RNA, 25 nt, Artificial Sequence
  Synthetic Oligonucleotide
aagacuuugugcgacaaugcuucua

SEQ ID NO: 11822 - RNA, 25 nt, Artificial Sequence
  Synthetic Oligonucleotide
aggauuuugugcgacaaugcuucaa

SEQ ID NO: 11823 - RNA, 25 nt, Artificial Sequence
  Synthetic Oligonucleotide
aggauuuugugcgacaaugcuuuaa

SEQ ID NO: 11824 - RNA, 25 nt, Artificial Sequence
  Synthetic Oligonucleotide
gagauuuugugcgacaaugcuucaa

SEQ ID NO: 11825 - RNA, 25 nt, Artificial Sequence
  Synthetic Oligonucleotide
uagauuuugugcgacaaugcuucaa

SEQ ID NO: 11826 - RNA, 25 nt, Artificial Sequence
  Synthetic Oligonucleotide
aagauuuugugcgacgcugcuucaa

SEQ ID NO: 11827 - RNA, 25 nt, Artificial Sequence
  Synthetic Oligonucleotide
aagauuuuguacggcaaugcuucaa

SEQ ID NO: 11828 - RNA, 25 nt, Artificial Sequence
  Synthetic Oligonucleotide
aagauuuugagggacaaugguucaa

SEQ ID NO: 11829 - RNA, 25 nt, Artificial Sequence
  Synthetic Oligonucleotide
aagacuuugugcgacagugcuucaa

SEQ ID NO: 11830 - RNA, 25 nt, Artificial Sequence
  Synthetic Oligonucleotide
aagacuuugugcggcaaugcuucaa

SEQ ID NO: 11831 - RNA, 25 nt, Artificial Sequence
  Synthetic Oligonucleotide
aagacugugugcgacaaugcuucaa

SEQ ID NO: 11832 - RNA, 25 nt, Artificial Sequence
  Synthetic Oligonucleotide
gagaauuugugcgacaaugcuucaa

SEQ ID NO: 11833 - RNA, 25 nt, Artificial Sequence
  Synthetic Oligonucleotide
gagacuuugugcgacaaugcuucaa

SEQ ID NO: 11834 - RNA, 25 nt, Artificial Sequence
  Synthetic Oligonucleotide
caaacaaauuugcagcaauaugcau

SEQ ID NO: 11835 - RNA, 25 nt, Artificial Sequence
  Synthetic Oligonucleotide
caaacaaauuugcagcaauauguac

SEQ ID NO: 11836 - RNA, 25 nt, Artificial Sequence
  Synthetic Oligonucleotide
caaacaaauuugcggcaauaugcac

SEQ ID NO: 11837 - RNA, 25 nt, Artificial Sequence
  Synthetic Oligonucleotide
caaacaaauuugcugcaauaugcac

SEQ ID NO: 11838 - RNA, 25 nt, Artificial Sequence
  Synthetic Oligonucleotide
caaacaaauuugcugcaauauguac

SEQ ID NO: 11839 - RNA, 25 nt, Artificial Sequence
  Synthetic Oligonucleotide
caaacaaauucgcagcaauaugcac

SEQ ID NO: 11840 - RNA, 25 nt, Artificial Sequence
  Synthetic Oligonucleotide
caaacaaacuugcagcaauaugcac

SEQ ID NO: 11841 - RNA, 25 nt, Artificial Sequence
  Synthetic Oligonucleotide
caaauaaauuugcagcaauaugcac

SEQ ID NO: 11842 - RNA, 25 nt, Artificial Sequence
  Synthetic Oligonucleotide
cgaacaaauuugcagcaauaugcac

SEQ ID NO: 11843 - RNA, 25 nt, Artificial Sequence
  Synthetic Oligonucleotide
cuaacaaauuugcagcaauaugcac

SEQ ID NO: 11844 - RNA, 25 nt, Artificial Sequence
  Synthetic Oligonucleotide
cgaacaaauuugccgcaauaugcac

SEQ ID NO: 11845 - RNA, 25 nt, Artificial Sequence
  Synthetic Oligonucleotide
cgaacaaauuugcugcaauaugcac

SEQ ID NO: 11846 - RNA, 25 nt, Artificial Sequence
  Synthetic Oligonucleotide
caaacaaguucgcugcaauaugcac

SEQ ID NO: 11847 - RNA, 25 nt, Artificial Sequence
  Synthetic Oligonucleotide
ccaacaaauucgcugcaauaugcac

SEQ ID NO: 11848 - RNA, 25 nt, Artificial Sequence
  Synthetic Oligonucleotide
cgaacaaauucgccgcaauaugcac

SEQ ID NO: 11849 - RNA, 25 nt, Artificial Sequence
  Synthetic Oligonucleotide
cgaacaaguuugcugcaauaugcac

SEQ ID NO: 11850 - RNA, 25 nt, Artificial Sequence
  Synthetic Oligonucleotide
ucauguauucagauuuucacuucau

SEQ ID NO: 11851 - RNA, 25 nt, Artificial Sequence
  Synthetic Oligonucleotide
ucauguauucagauuuccauuucau

SEQ ID NO: 11852 - RNA, 25 nt, Artificial Sequence
  Synthetic Oligonucleotide
ucauguauucagauuuccacuucau

SEQ ID NO: 11853 - RNA, 25 nt, Artificial Sequence
  Synthetic Oligonucleotide
ucauguauucagacuuucauuucau

SEQ ID NO: 11854 - RNA, 25 nt, Artificial Sequence
  Synthetic Oligonucleotide
ucauguauucggauuuucauuucau

SEQ ID NO: 11855 - RNA, 25 nt, Artificial Sequence
  Synthetic Oligonucleotide
ucauguauucggauuuucacuuuau

SEQ ID NO: 11856 - RNA, 25 nt, Artificial Sequence
  Synthetic Oligonucleotide
ucauguauucggauuuucacuuugu

SEQ ID NO: 11857 - RNA, 25 nt, Artificial Sequence
  Synthetic Oligonucleotide
ucauguacucagauuuucauuucau

SEQ ID NO: 11858 - RNA, 25 nt, Artificial Sequence
  Synthetic Oligonucleotide
uaauguauucagauuuucauuucau

SEQ ID NO: 11859 - RNA, 25 nt, Artificial Sequence
  Synthetic Oligonucleotide
uuauguauucagauuuucauuucau

SEQ ID NO: 11860 - RNA, 25 nt, Artificial Sequence
  Synthetic Oligonucleotide
ucauguauucagacuuccauuucau

SEQ ID NO: 11861 - RNA, 25 nt, Artificial Sequence
  Synthetic Oligonucleotide
ucauguauucagacuuccauuuuau

SEQ ID NO: 11862 - RNA, 25 nt, Artificial Sequence
  Synthetic Oligonucleotide
ucauguauucggauuuccauuucau

SEQ ID NO: 11863 - RNA, 25 nt, Artificial Sequence
  Synthetic Oligonucleotide
ucauguauucggauuuccacuucau

SEQ ID NO: 11864 - RNA, 25 nt, Artificial Sequence
  Synthetic Oligonucleotide
ucauguauucggauuuccacuuuau

SEQ ID NO: 11865 - RNA, 25 nt, Artificial Sequence
  Synthetic Oligonucleotide
ucauguauucggacuuucacuuuau

SEQ ID NO: 11866 - RNA, 25 nt, Artificial Sequence
  Synthetic Oligonucleotide
uuauguauucggauuuccacuucau

SEQ ID NO: 11867 - RNA, 25 nt, Artificial Sequence
  Synthetic Oligonucleotide
gaaacaaacaaauuugcggcaauau

SEQ ID NO: 11868 - RNA, 25 nt, Artificial Sequence
  Synthetic Oligonucleotide
gaaacaaacaaauuugcugcaauau

SEQ ID NO: 11869 - RNA, 25 nt, Artificial Sequence
  Synthetic Oligonucleotide
gaaacaaacaaauucgcagcaauau

SEQ ID NO: 11870 - RNA, 25 nt, Artificial Sequence
  Synthetic Oligonucleotide
gaaacaaacaaacuugcagcaauau

SEQ ID NO: 11871 - RNA, 25 nt, Artificial Sequence
  Synthetic Oligonucleotide
gaaacaaauaaauuugcagcaauau

SEQ ID NO: 11872 - RNA, 25 nt, Artificial Sequence
  Synthetic Oligonucleotide
gaaacgaacaaauuugcagcaauau

SEQ ID NO: 11873 - RNA, 25 nt, Artificial Sequence
  Synthetic Oligonucleotide
gaaacuaacaaauuugcagcaauau

SEQ ID NO: 11874 - RNA, 25 nt, Artificial Sequence
  Synthetic Oligonucleotide
gagacaaacaaauuugcagcaauau

SEQ ID NO: 11875 - RNA, 25 nt, Artificial Sequence
  Synthetic Oligonucleotide
gaaacgaacaaauuugccgcaauau

SEQ ID NO: 11876 - RNA, 25 nt, Artificial Sequence
  Synthetic Oligonucleotide
gaaacgaacaaauuugcugcaauau

SEQ ID NO: 11877 - RNA, 25 nt, Artificial Sequence
  Synthetic Oligonucleotide
gagacaaacaaauuugcugcaauau

SEQ ID NO: 11878 - RNA, 25 nt, Artificial Sequence
  Synthetic Oligonucleotide
gaaacaaacaaguucgcugcaauau

SEQ ID NO: 11879 - RNA, 25 nt, Artificial Sequence
  Synthetic Oligonucleotide
gaaaccaacaaauucgcugcaauau

SEQ ID NO: 11880 - RNA, 25 nt, Artificial Sequence
  Synthetic Oligonucleotide
gaaacgaacaaauucgccgcaauau

SEQ ID NO: 11881 - RNA, 25 nt, Artificial Sequence
  Synthetic Oligonucleotide
gaaacgaacaaguuugcugcaauau

SEQ ID NO: 11882 - RNA, 25 nt, Artificial Sequence
  Synthetic Oligonucleotide
uucauguauucagauuuucacuuca

SEQ ID NO: 11883 - RNA, 25 nt, Artificial Sequence
  Synthetic Oligonucleotide
uucauguauucagauuuccauuuca

SEQ ID NO: 11884 - RNA, 25 nt, Artificial Sequence
  Synthetic Oligonucleotide
uucauguauucagauuuccacuuca

SEQ ID NO: 11885 - RNA, 25 nt, Artificial Sequence
  Synthetic Oligonucleotide
uucauguauucagacuuucauuuca

SEQ ID NO: 11886 - RNA, 25 nt, Artificial Sequence
  Synthetic Oligonucleotide
uucauguauucggauuuucauuuca

SEQ ID NO: 11887 - RNA, 25 nt, Artificial Sequence
  Synthetic Oligonucleotide
uucauguauucggauuuucacuuua

SEQ ID NO: 11888 - RNA, 25 nt, Artificial Sequence
  Synthetic Oligonucleotide
uucauguauucggauuuucacuuug

SEQ ID NO: 11889 - RNA, 25 nt, Artificial Sequence
  Synthetic Oligonucleotide
uucauguacucagauuuucauuuca

SEQ ID NO: 11890 - RNA, 25 nt, Artificial Sequence
  Synthetic Oligonucleotide
uuaauguauucagauuuucauuuca

SEQ ID NO: 11891 - RNA, 25 nt, Artificial Sequence
  Synthetic Oligonucleotide
uuuauguauucagauuuucauuuca

SEQ ID NO: 11892 - RNA, 25 nt, Artificial Sequence
  Synthetic Oligonucleotide
cucauguauucagauuuucauuuca

SEQ ID NO: 11893 - RNA, 25 nt, Artificial Sequence
  Synthetic Oligonucleotide
uucauguauucagacuuccauuuca

SEQ ID NO: 11894 - RNA, 25 nt, Artificial Sequence
  Synthetic Oligonucleotide
uucauguauucagacuuccauuuua

SEQ ID NO: 11895 - RNA, 25 nt, Artificial Sequence
  Synthetic Oligonucleotide
uucauguauucggauuuccauuuca

SEQ ID NO: 11896 - RNA, 25 nt, Artificial Sequence
  Synthetic Oligonucleotide
uucauguauucggauuuccacuuca

SEQ ID NO: 11897 - RNA, 25 nt, Artificial Sequence
  Synthetic Oligonucleotide
uucauguauucggauuuccacuuua

SEQ ID NO: 11898 - RNA, 25 nt, Artificial Sequence
  Synthetic Oligonucleotide
uucauguauucggacuuucacuuua

SEQ ID NO: 11899 - RNA, 25 nt, Artificial Sequence
  Synthetic Oligonucleotide
uuuauguauucggauuuccacuuca

SEQ ID NO: 11900 - RNA, 25 nt, Artificial Sequence
  Synthetic Oligonucleotide
gaauuuuagagccuauguggauggg

SEQ ID NO: 11901 - RNA, 25 nt, Artificial Sequence
  Synthetic Oligonucleotide
gaauuuuagagccuauguggauaga

SEQ ID NO: 11902 - RNA, 25 nt, Artificial Sequence
  Synthetic Oligonucleotide
gaauuuuagagccuauguagaugga

SEQ ID NO: 11903 - RNA, 25 nt, Artificial Sequence
  Synthetic Oligonucleotide
gaauuuuagaaccuauguggaugga

SEQ ID NO: 11904 - RNA, 25 nt, Artificial Sequence
  Synthetic Oligonucleotide
gaauuuuaaagccuauguggaugga

SEQ ID NO: 11905 - RNA, 25 nt, Artificial Sequence
  Synthetic Oligonucleotide
gaacuuuagagccuauguggaugga

SEQ ID NO: 11906 - RNA, 25 nt, Artificial Sequence
  Synthetic Oligonucleotide
gaguuuuagagccuauguggaugga

SEQ ID NO: 11907 - RNA, 25 nt, Artificial Sequence
  Synthetic Oligonucleotide
gauuuuuagagccuauguggaugga

SEQ ID NO: 11908 - RNA, 25 nt, Artificial Sequence
  Synthetic Oligonucleotide
aaauuuuagagccuauguggaugga

SEQ ID NO: 11909 - RNA, 25 nt, Artificial Sequence
  Synthetic Oligonucleotide
gaacuuuagagcauauguggaugga

SEQ ID NO: 11910 - RNA, 25 nt, Artificial Sequence
  Synthetic Oligonucleotide
aaaauuuagagccuauguggaugga

SEQ ID NO: 11911 - RNA, 25 nt, Artificial Sequence
  Synthetic Oligonucleotide
aaacuuuagagccuauguggaugga

SEQ ID NO: 11912 - RNA, 25 nt, Artificial Sequence
  Synthetic Oligonucleotide
aaacuuuagagccuauguggauggg

SEQ ID NO: 11913 - RNA, 25 nt, Artificial Sequence
  Synthetic Oligonucleotide
aaacuuuagagccuauguagauggg

SEQ ID NO: 11914 - RNA, 25 nt, Artificial Sequence
  Synthetic Oligonucleotide
aaacuuuagaaccuauguggaugga

SEQ ID NO: 11915 - RNA, 25 nt, Artificial Sequence
  Synthetic Oligonucleotide
aaccuuuagagccuauguggaugga

SEQ ID NO: 11916 - RNA, 25 nt, Artificial Sequence
  Synthetic Oligonucleotide
aaacaaacaaauuugcggcaauaug

SEQ ID NO: 11917 - RNA, 25 nt, Artificial Sequence
  Synthetic Oligonucleotide
aaacaaacaaauuugcugcaauaug

SEQ ID NO: 11918 - RNA, 25 nt, Artificial Sequence
  Synthetic Oligonucleotide
aaacaaacaaauucgcagcaauaug

SEQ ID NO: 11919 - RNA, 25 nt, Artificial Sequence
  Synthetic Oligonucleotide
aaacaaacaaacuugcagcaauaug

SEQ ID NO: 11920 - RNA, 25 nt, Artificial Sequence
  Synthetic Oligonucleotide
aaacaaauaaauuugcagcaauaug

SEQ ID NO: 11921 - RNA, 25 nt, Artificial Sequence
  Synthetic Oligonucleotide
aaacgaacaaauuugcagcaauaug

SEQ ID NO: 11922 - RNA, 25 nt, Artificial Sequence
  Synthetic Oligonucleotide
aaacuaacaaauuugcagcaauaug

SEQ ID NO: 11923 - RNA, 25 nt, Artificial Sequence
  Synthetic Oligonucleotide
agacaaacaaauuugcagcaauaug

SEQ ID NO: 11924 - RNA, 25 nt, Artificial Sequence
  Synthetic Oligonucleotide
aaacgaacaaauuugccgcaauaug

SEQ ID NO: 11925 - RNA, 25 nt, Artificial Sequence
  Synthetic Oligonucleotide
aaacgaacaaauuugcugcaauaug

SEQ ID NO: 11926 - RNA, 25 nt, Artificial Sequence
  Synthetic Oligonucleotide
agacaaacaaauuugcugcaauaug

SEQ ID NO: 11927 - RNA, 25 nt, Artificial Sequence
  Synthetic Oligonucleotide
aaacaaacaaguucgcugcaauaug

SEQ ID NO: 11928 - RNA, 25 nt, Artificial Sequence
  Synthetic Oligonucleotide
aaaccaacaaauucgcugcaauaug

SEQ ID NO: 11929 - RNA, 25 nt, Artificial Sequence
  Synthetic Oligonucleotide
aaacgaacaaauucgccgcaauaug

SEQ ID NO: 11930 - RNA, 25 nt, Artificial Sequence
  Synthetic Oligonucleotide
aaacgaacaaguuugcugcaauaug

SEQ ID NO: 11931 - RNA, 25 nt, Artificial Sequence
  Synthetic Oligonucleotide
aacaaacaaauuugcagcaauaugu

SEQ ID NO: 11932 - RNA, 25 nt, Artificial Sequence
  Synthetic Oligonucleotide
aacaaacaaauuugcggcaauaugc

SEQ ID NO: 11933 - RNA, 25 nt, Artificial Sequence
  Synthetic Oligonucleotide
aacaaacaaauuugcugcaauaugc

SEQ ID NO: 11934 - RNA, 25 nt, Artificial Sequence
  Synthetic Oligonucleotide
aacaaacaaauuugcugcaauaugu

SEQ ID NO: 11935 - RNA, 25 nt, Artificial Sequence
  Synthetic Oligonucleotide
aacaaacaaauucgcagcaauaugc

SEQ ID NO: 11936 - RNA, 25 nt, Artificial Sequence
  Synthetic Oligonucleotide
aacaaacaaacuugcagcaauaugc

SEQ ID NO: 11937 - RNA, 25 nt, Artificial Sequence
  Synthetic Oligonucleotide
aacaaauaaauuugcagcaauaugc

SEQ ID NO: 11938 - RNA, 25 nt, Artificial Sequence
  Synthetic Oligonucleotide
aacgaacaaauuugcagcaauaugc

SEQ ID NO: 11939 - RNA, 25 nt, Artificial Sequence
  Synthetic Oligonucleotide
aacuaacaaauuugcagcaauaugc

SEQ ID NO: 11940 - RNA, 25 nt, Artificial Sequence
  Synthetic Oligonucleotide
gacaaacaaauuugcagcaauaugc

SEQ ID NO: 11941 - RNA, 25 nt, Artificial Sequence
  Synthetic Oligonucleotide
aacgaacaaauuugccgcaauaugc

SEQ ID NO: 11942 - RNA, 25 nt, Artificial Sequence
  Synthetic Oligonucleotide
aacgaacaaauuugcugcaauaugc

SEQ ID NO: 11943 - RNA, 25 nt, Artificial Sequence
  Synthetic Oligonucleotide
gacaaacaaauuugcugcaauaugu

SEQ ID NO: 11944 - RNA, 25 nt, Artificial Sequence
  Synthetic Oligonucleotide
aacaaacaaguucgcugcaauaugc

SEQ ID NO: 11945 - RNA, 25 nt, Artificial Sequence
  Synthetic Oligonucleotide
aaccaacaaauucgcugcaauaugc

SEQ ID NO: 11946 - RNA, 25 nt, Artificial Sequence
  Synthetic Oligonucleotide
aacgaacaaauucgccgcaauaugc

SEQ ID NO: 11947 - RNA, 25 nt, Artificial Sequence
  Synthetic Oligonucleotide
aacgaacaaguuugcugcaauaugc

SEQ ID NO: 11948 - RNA, 25 nt, Artificial Sequence
  Synthetic Oligonucleotide
uguauucagauuuucauuucauuaa

SEQ ID NO: 11949 - RNA, 25 nt, Artificial Sequence
  Synthetic Oligonucleotide
uguauucagauuuucacuucaucaa

SEQ ID NO: 11950 - RNA, 25 nt, Artificial Sequence
  Synthetic Oligonucleotide
uguauucagauuuucacuucaucga

SEQ ID NO: 11951 - RNA, 25 nt, Artificial Sequence
  Synthetic Oligonucleotide
uguauucagauuuccauuucaucaa

SEQ ID NO: 11952 - RNA, 25 nt, Artificial Sequence
  Synthetic Oligonucleotide
uguauucagacuuucauuucaucaa

SEQ ID NO: 11953 - RNA, 25 nt, Artificial Sequence
  Synthetic Oligonucleotide
uguauucggauuuucauuucaucaa

SEQ ID NO: 11954 - RNA, 25 nt, Artificial Sequence
  Synthetic Oligonucleotide
uguacucagauuuucauuucaucaa

SEQ ID NO: 11955 - RNA, 25 nt, Artificial Sequence
  Synthetic Oligonucleotide
uguauucagauuuccacuucaucaa

SEQ ID NO: 11956 - RNA, 25 nt, Artificial Sequence
  Synthetic Oligonucleotide
uguauucagauuuccacuucauuga

SEQ ID NO: 11957 - RNA, 25 nt, Artificial Sequence
  Synthetic Oligonucleotide
uguauucagacuuccauuucauuga

SEQ ID NO: 11958 - RNA, 25 nt, Artificial Sequence
  Synthetic Oligonucleotide
uguauucagacuuccauuuuauuga

SEQ ID NO: 11959 - RNA, 25 nt, Artificial Sequence
  Synthetic Oligonucleotide
uguauucggauuuucacuuuauuga

SEQ ID NO: 11960 - RNA, 25 nt, Artificial Sequence
  Synthetic Oligonucleotide
uguauucggauuuucacuuuguuga

SEQ ID NO: 11961 - RNA, 25 nt, Artificial Sequence
  Synthetic Oligonucleotide
uguauucggauuuccauuucauuga

SEQ ID NO: 11962 - RNA, 25 nt, Artificial Sequence
  Synthetic Oligonucleotide
uguauucggauuuccacuucaucaa

SEQ ID NO: 11963 - RNA, 25 nt, Artificial Sequence
  Synthetic Oligonucleotide
uguauucggauuuccacuucaucga

SEQ ID NO: 11964 - RNA, 25 nt, Artificial Sequence
  Synthetic Oligonucleotide
uguauucggauuuccacuucauuga

SEQ ID NO: 11965 - RNA, 25 nt, Artificial Sequence
  Synthetic Oligonucleotide
uguauucggauuuccacuuuauuga

SEQ ID NO: 11966 - RNA, 25 nt, Artificial Sequence
  Synthetic Oligonucleotide
uguauucggacuuucacuuuauuga

SEQ ID NO: 11967 - RNA, 25 nt, Artificial Sequence
  Synthetic Oligonucleotide
auguauucagauuuucauuucauua

SEQ ID NO: 11968 - RNA, 25 nt, Artificial Sequence
  Synthetic Oligonucleotide
auguauucagauuuucacuucauca

SEQ ID NO: 11969 - RNA, 25 nt, Artificial Sequence
  Synthetic Oligonucleotide
auguauucagauuuucacuucaucg

SEQ ID NO: 11970 - RNA, 25 nt, Artificial Sequence
  Synthetic Oligonucleotide
auguauucagauuuccauuucauca

SEQ ID NO: 11971 - RNA, 25 nt, Artificial Sequence
  Synthetic Oligonucleotide
auguauucagacuuucauuucauca

SEQ ID NO: 11972 - RNA, 25 nt, Artificial Sequence
  Synthetic Oligonucleotide
auguauucggauuuucauuucauca

SEQ ID NO: 11973 - RNA, 25 nt, Artificial Sequence
  Synthetic Oligonucleotide
auguacucagauuuucauuucauca

SEQ ID NO: 11974 - RNA, 25 nt, Artificial Sequence
  Synthetic Oligonucleotide
auguauucagauuuccacuucauca

SEQ ID NO: 11975 - RNA, 25 nt, Artificial Sequence
  Synthetic Oligonucleotide
auguauucagauuuccacuucauug

SEQ ID NO: 11976 - RNA, 25 nt, Artificial Sequence
  Synthetic Oligonucleotide
auguauucagacuuccauuucauug

SEQ ID NO: 11977 - RNA, 25 nt, Artificial Sequence
  Synthetic Oligonucleotide
auguauucagacuuccauuuuauug

SEQ ID NO: 11978 - RNA, 25 nt, Artificial Sequence
  Synthetic Oligonucleotide
auguauucggauuuucacuuuauug

SEQ ID NO: 11979 - RNA, 25 nt, Artificial Sequence
  Synthetic Oligonucleotide
auguauucggauuuucacuuuguug

SEQ ID NO: 11980 - RNA, 25 nt, Artificial Sequence
  Synthetic Oligonucleotide
auguauucggauuuccauuucauug

SEQ ID NO: 11981 - RNA, 25 nt, Artificial Sequence
  Synthetic Oligonucleotide
auguauucggauuuccacuucauca

SEQ ID NO: 11982 - RNA, 25 nt, Artificial Sequence
  Synthetic Oligonucleotide
auguauucggauuuccacuucaucg

SEQ ID NO: 11983 - RNA, 25 nt, Artificial Sequence
  Synthetic Oligonucleotide
auguauucggauuuccacuucauug

SEQ ID NO: 11984 - RNA, 25 nt, Artificial Sequence
  Synthetic Oligonucleotide
auguauucggauuuccacuuuauug

SEQ ID NO: 11985 - RNA, 25 nt, Artificial Sequence
  Synthetic Oligonucleotide
auguauucggacuuucacuuuauug

SEQ ID NO: 11986 - RNA, 25 nt, Artificial Sequence
  Synthetic Oligonucleotide
guauucagauuuucauuucaucaac

SEQ ID NO: 11987 - RNA, 25 nt, Artificial Sequence
  Synthetic Oligonucleotide
guauucagauuuucauuucauuaau

SEQ ID NO: 11988 - RNA, 25 nt, Artificial Sequence
  Synthetic Oligonucleotide
guauucagauuuucacuucaucaau

SEQ ID NO: 11989 - RNA, 25 nt, Artificial Sequence
  Synthetic Oligonucleotide
guauucagauuuucacuucaucgau

SEQ ID NO: 11990 - RNA, 25 nt, Artificial Sequence
  Synthetic Oligonucleotide
guauucagauuuccauuucaucaau

SEQ ID NO: 11991 - RNA, 25 nt, Artificial Sequence
  Synthetic Oligonucleotide
guauucagacuuucauuucaucaau

SEQ ID NO: 11992 - RNA, 25 nt, Artificial Sequence
  Synthetic Oligonucleotide
guauucggauuuucauuucaucaau

SEQ ID NO: 11993 - RNA, 25 nt, Artificial Sequence
  Synthetic Oligonucleotide
guacucagauuuucauuucaucaau

SEQ ID NO: 11994 - RNA, 25 nt, Artificial Sequence
  Synthetic Oligonucleotide
guauucagauuuccacuucaucaau

SEQ ID NO: 11995 - RNA, 25 nt, Artificial Sequence
  Synthetic Oligonucleotide
guauucagauuuccacuucauugau

SEQ ID NO: 11996 - RNA, 25 nt, Artificial Sequence
  Synthetic Oligonucleotide
guauucagacuuccauuucauugac

SEQ ID NO: 11997 - RNA, 25 nt, Artificial Sequence
  Synthetic Oligonucleotide
guauucggauuuccauuucauugac

SEQ ID NO: 11998 - RNA, 25 nt, Artificial Sequence
  Synthetic Oligonucleotide
guauucagacuuccauuuuauugac

SEQ ID NO: 11999 - RNA, 25 nt, Artificial Sequence
  Synthetic Oligonucleotide
guauucggauuuucacuuuauugau

SEQ ID NO: 12000 - RNA, 25 nt, Artificial Sequence
  Synthetic Oligonucleotide
guauucggauuuucacuuuguugau

SEQ ID NO: 12001 - RNA, 25 nt, Artificial Sequence
  Synthetic Oligonucleotide
guauucggauuuccacuucaucaau

SEQ ID NO: 12002 - RNA, 25 nt, Artificial Sequence
  Synthetic Oligonucleotide
guauucggauuuccacuucaucgau

SEQ ID NO: 12003 - RNA, 25 nt, Artificial Sequence
  Synthetic Oligonucleotide
guauucggauuuccacuucauugau

SEQ ID NO: 12004 - RNA, 25 nt, Artificial Sequence
  Synthetic Oligonucleotide
auucagauuuucauuucaucaacga

SEQ ID NO: 12005 - RNA, 25 nt, Artificial Sequence
  Synthetic Oligonucleotide
auucagauuuucauuucauuaauga

SEQ ID NO: 12006 - RNA, 25 nt, Artificial Sequence
  Synthetic Oligonucleotide
auucagauuuucacuucaucaauga

SEQ ID NO: 12007 - RNA, 25 nt, Artificial Sequence
  Synthetic Oligonucleotide
auucagauuuucacuucaucgauga

SEQ ID NO: 12008 - RNA, 25 nt, Artificial Sequence
  Synthetic Oligonucleotide
auucagauuuccauuucaucaauga

SEQ ID NO: 12009 - RNA, 25 nt, Artificial Sequence
  Synthetic Oligonucleotide
auucagacuuucauuucaucaauga

SEQ ID NO: 12010 - RNA, 25 nt, Artificial Sequence
  Synthetic Oligonucleotide
auucggauuuucauuucaucaauga

SEQ ID NO: 12011 - RNA, 25 nt, Artificial Sequence
  Synthetic Oligonucleotide
acucagauuuucauuucaucaauga

SEQ ID NO: 12012 - RNA, 25 nt, Artificial Sequence
  Synthetic Oligonucleotide
auucagauuuccacuucaucaauga

SEQ ID NO: 12013 - RNA, 25 nt, Artificial Sequence
  Synthetic Oligonucleotide
auucagauuuccacuucauugauga

SEQ ID NO: 12014 - RNA, 25 nt, Artificial Sequence
  Synthetic Oligonucleotide
auucagacuuccauuucauugacga

SEQ ID NO: 12015 - RNA, 25 nt, Artificial Sequence
  Synthetic Oligonucleotide
auucggauuuccauuucauugacga

SEQ ID NO: 12016 - RNA, 25 nt, Artificial Sequence
  Synthetic Oligonucleotide
auucagacuuccauuuuauugacga

SEQ ID NO: 12017 - RNA, 25 nt, Artificial Sequence
  Synthetic Oligonucleotide
auucggauuuucacuuuauugauga

SEQ ID NO: 12018 - RNA, 25 nt, Artificial Sequence
  Synthetic Oligonucleotide
auucggauuuccacuucaucaauga

SEQ ID NO: 12019 - RNA, 25 nt, Artificial Sequence
  Synthetic Oligonucleotide
auucggauuuccacuucaucgauga

SEQ ID NO: 12020 - RNA, 25 nt, Artificial Sequence
  Synthetic Oligonucleotide
auucggauuuccacuucauugauga

SEQ ID NO: 12021 - RNA, 25 nt, Artificial Sequence
  Synthetic Oligonucleotide
uauucagauuuucauuucaucaacg

SEQ ID NO: 12022 - RNA, 25 nt, Artificial Sequence
  Synthetic Oligonucleotide
uauucagauuuucauuucauuaaug

SEQ ID NO: 12023 - RNA, 25 nt, Artificial Sequence
  Synthetic Oligonucleotide
uauucagauuuucacuucaucaaug

SEQ ID NO: 12024 - RNA, 25 nt, Artificial Sequence
  Synthetic Oligonucleotide
uauucagauuuucacuucaucgaug

SEQ ID NO: 12025 - RNA, 25 nt, Artificial Sequence
  Synthetic Oligonucleotide
uauucagauuuccauuucaucaaug

SEQ ID NO: 12026 - RNA, 25 nt, Artificial Sequence
  Synthetic Oligonucleotide
uauucagacuuucauuucaucaaug

SEQ ID NO: 12027 - RNA, 25 nt, Artificial Sequence
  Synthetic Oligonucleotide
uauucggauuuucauuucaucaaug

SEQ ID NO: 12028 - RNA, 25 nt, Artificial Sequence
  Synthetic Oligonucleotide
uacucagauuuucauuucaucaaug

SEQ ID NO: 12029 - RNA, 25 nt, Artificial Sequence
  Synthetic Oligonucleotide
uauucagauuuccacuucaucaaug

SEQ ID NO: 12030 - RNA, 25 nt, Artificial Sequence
  Synthetic Oligonucleotide
uauucagauuuccacuucauugaug

SEQ ID NO: 12031 - RNA, 25 nt, Artificial Sequence
  Synthetic Oligonucleotide
uauucagacuuccauuucauugacg

SEQ ID NO: 12032 - RNA, 25 nt, Artificial Sequence
  Synthetic Oligonucleotide
uauucggauuuccauuucauugacg

SEQ ID NO: 12033 - RNA, 25 nt, Artificial Sequence
  Synthetic Oligonucleotide
uauucagacuuccauuuuauugacg

SEQ ID NO: 12034 - RNA, 25 nt, Artificial Sequence
  Synthetic Oligonucleotide
uauucggauuuucacuuuauugaug

SEQ ID NO: 12035 - RNA, 25 nt, Artificial Sequence
  Synthetic Oligonucleotide
uauucggauuuccacuucaucaaug

SEQ ID NO: 12036 - RNA, 25 nt, Artificial Sequence
  Synthetic Oligonucleotide
uauucggauuuccacuucaucgaug

SEQ ID NO: 12037 - RNA, 25 nt, Artificial Sequence
  Synthetic Oligonucleotide
uauucggauuuccacuucauugaug

SEQ ID NO: 12038 - RNA, 25 nt, Artificial Sequence
  Synthetic Oligonucleotide
cauguauucagauuuucauuucauu

SEQ ID NO: 12039 - RNA, 25 nt, Artificial Sequence
  Synthetic Oligonucleotide
cauguauucagauuuucacuucauc

SEQ ID NO: 12040 - RNA, 25 nt, Artificial Sequence
  Synthetic Oligonucleotide
cauguauucagauuuccauuucauc

SEQ ID NO: 12041 - RNA, 25 nt, Artificial Sequence
  Synthetic Oligonucleotide
cauguauucagacuuucauuucauc

SEQ ID NO: 12042 - RNA, 25 nt, Artificial Sequence
  Synthetic Oligonucleotide
cauguauucggauuuucauuucauc

SEQ ID NO: 12043 - RNA, 25 nt, Artificial Sequence
  Synthetic Oligonucleotide
cauguacucagauuuucauuucauc

SEQ ID NO: 12044 - RNA, 25 nt, Artificial Sequence
  Synthetic Oligonucleotide
aauguauucagauuuucauuucauc

SEQ ID NO: 12045 - RNA, 25 nt, Artificial Sequence
  Synthetic Oligonucleotide
uauguauucagauuuucauuucauc

SEQ ID NO: 12046 - RNA, 25 nt, Artificial Sequence
  Synthetic Oligonucleotide
cauguauucagauuuccacuucauc

SEQ ID NO: 12047 - RNA, 25 nt, Artificial Sequence
  Synthetic Oligonucleotide
cauguauucagauuuccacuucauu

SEQ ID NO: 12048 - RNA, 25 nt, Artificial Sequence
  Synthetic Oligonucleotide
cauguauucagacuuccauuucauu

SEQ ID NO: 12049 - RNA, 25 nt, Artificial Sequence
  Synthetic Oligonucleotide
cauguauucagacuuccauuuuauu

SEQ ID NO: 12050 - RNA, 25 nt, Artificial Sequence
  Synthetic Oligonucleotide
cauguauucggauuuucacuuuauu

SEQ ID NO: 12051 - RNA, 25 nt, Artificial Sequence
  Synthetic Oligonucleotide
cauguauucggauuuucacuuuguu

SEQ ID NO: 12052 - RNA, 25 nt, Artificial Sequence
  Synthetic Oligonucleotide
cauguauucggauuuccauuucauu

SEQ ID NO: 12053 - RNA, 25 nt, Artificial Sequence
  Synthetic Oligonucleotide
cauguauucggauuuccacuucauc

SEQ ID NO: 12054 - RNA, 25 nt, Artificial Sequence
  Synthetic Oligonucleotide
cauguauucggauuuccacuuuauu

SEQ ID NO: 12055 - RNA, 25 nt, Artificial Sequence
  Synthetic Oligonucleotide
cauguauucggacuuucacuuuauu

SEQ ID NO: 12056 - RNA, 25 nt, Artificial Sequence
  Synthetic Oligonucleotide
gaagauuuugugcgacaaugcuuua

SEQ ID NO: 12057 - RNA, 25 nt, Artificial Sequence
  Synthetic Oligonucleotide
gaagauuuugugcgacaauguuuca

SEQ ID NO: 12058 - RNA, 25 nt, Artificial Sequence
  Synthetic Oligonucleotide
gaagauuuugugcgacagugcuuca

SEQ ID NO: 12059 - RNA, 25 nt, Artificial Sequence
  Synthetic Oligonucleotide
gaagauuuugugcggcaaugcuuca

SEQ ID NO: 12060 - RNA, 25 nt, Artificial Sequence
  Synthetic Oligonucleotide
gaagauuuugugagacaaugcuuca

SEQ ID NO: 12061 - RNA, 25 nt, Artificial Sequence
  Synthetic Oligonucleotide
gaagauuuugugggacaaugcuuca

SEQ ID NO: 12062 - RNA, 25 nt, Artificial Sequence
  Synthetic Oligonucleotide
gaagauuuuguacgacaaugcuuua

SEQ ID NO: 12063 - RNA, 25 nt, Artificial Sequence
  Synthetic Oligonucleotide
gaagauuucgugcgacaaugcuuca

SEQ ID NO: 12064 - RNA, 25 nt, Artificial Sequence
  Synthetic Oligonucleotide
gaagaucuugugcgacaaugcuuca

SEQ ID NO: 12065 - RNA, 25 nt, Artificial Sequence
  Synthetic Oligonucleotide
gaagaauuugugcgacaaugcuuca

SEQ ID NO: 12066 - RNA, 25 nt, Artificial Sequence
  Synthetic Oligonucleotide
gaagacuuugugcgacaaugcuuca

SEQ ID NO: 12067 - RNA, 25 nt, Artificial Sequence
  Synthetic Oligonucleotide
gaagacuuugugcgacaaugcuucu

SEQ ID NO: 12068 - RNA, 25 nt, Artificial Sequence
  Synthetic Oligonucleotide
gaggauuuugugcgacaaugcuuca

SEQ ID NO: 12069 - RNA, 25 nt, Artificial Sequence
  Synthetic Oligonucleotide
gaggauuuugugcgacaaugcuuua

SEQ ID NO: 12070 - RNA, 25 nt, Artificial Sequence
  Synthetic Oligonucleotide
ggagauuuugugcgacaaugcuuca

SEQ ID NO: 12071 - RNA, 25 nt, Artificial Sequence
  Synthetic Oligonucleotide
guagauuuugugcgacaaugcuuca

SEQ ID NO: 12072 - RNA, 25 nt, Artificial Sequence
  Synthetic Oligonucleotide
gaagauuuugugcgacgcugcuuca

SEQ ID NO: 12073 - RNA, 25 nt, Artificial Sequence
  Synthetic Oligonucleotide
gaagauuuuguacggcaaugcuuca

SEQ ID NO: 12074 - RNA, 25 nt, Artificial Sequence
  Synthetic Oligonucleotide
gaagauuuugagggacaaugguuca

SEQ ID NO: 12075 - RNA, 25 nt, Artificial Sequence
  Synthetic Oligonucleotide
gaagacuuugugcgacagugcuuca

SEQ ID NO: 12076 - RNA, 25 nt, Artificial Sequence
  Synthetic Oligonucleotide
gaagacuuugugcggcaaugcuuca

SEQ ID NO: 12077 - RNA, 25 nt, Artificial Sequence
  Synthetic Oligonucleotide
gaagacugugugcgacaaugcuuca

SEQ ID NO: 12078 - RNA, 25 nt, Artificial Sequence
  Synthetic Oligonucleotide
agagaauuugugcgacaaugcuuca

SEQ ID NO: 12079 - RNA, 25 nt, Artificial Sequence
  Synthetic Oligonucleotide
uggaagauuuugugcgacaauguuu

SEQ ID NO: 12080 - RNA, 25 nt, Artificial Sequence
  Synthetic Oligonucleotide
uggaagauuuugugcgacagugcuu

SEQ ID NO: 12081 - RNA, 25 nt, Artificial Sequence
  Synthetic Oligonucleotide
uggaagauuuugugcgacgcugcuu

SEQ ID NO: 12082 - RNA, 25 nt, Artificial Sequence
  Synthetic Oligonucleotide
uggaagauuuugugcggcaaugcuu

SEQ ID NO: 12083 - RNA, 25 nt, Artificial Sequence
  Synthetic Oligonucleotide
uggaagauuuugugagacaaugcuu

SEQ ID NO: 12084 - RNA, 25 nt, Artificial Sequence
  Synthetic Oligonucleotide
uggaagauuuugugggacaaugcuu

SEQ ID NO: 12085 - RNA, 25 nt, Artificial Sequence
  Synthetic Oligonucleotide
uggaagauuuuguacgacaaugcuu

SEQ ID NO: 12086 - RNA, 25 nt, Artificial Sequence
  Synthetic Oligonucleotide
uggaagauuucgugcgacaaugcuu

SEQ ID NO: 12087 - RNA, 25 nt, Artificial Sequence
  Synthetic Oligonucleotide
uggaagaucuugugcgacaaugcuu

SEQ ID NO: 12088 - RNA, 25 nt, Artificial Sequence
  Synthetic Oligonucleotide
uggaagaauuugugcgacaaugcuu

SEQ ID NO: 12089 - RNA, 25 nt, Artificial Sequence
  Synthetic Oligonucleotide
uggaagacuuugugcgacaaugcuu

SEQ ID NO: 12090 - RNA, 25 nt, Artificial Sequence
  Synthetic Oligonucleotide
uggaagacuuugugcgacagugcuu

SEQ ID NO: 12091 - RNA, 25 nt, Artificial Sequence
  Synthetic Oligonucleotide
uggaggauuuugugcgacaaugcuu

SEQ ID NO: 12092 - RNA, 25 nt, Artificial Sequence
  Synthetic Oligonucleotide
uggaagauuuuguacggcaaugcuu

SEQ ID NO: 12093 - RNA, 25 nt, Artificial Sequence
  Synthetic Oligonucleotide
uggaagauuuugagggacaaugguu

SEQ ID NO: 12094 - RNA, 25 nt, Artificial Sequence
  Synthetic Oligonucleotide
uggaagacuuugugcggcaaugcuu

SEQ ID NO: 12095 - RNA, 25 nt, Artificial Sequence
  Synthetic Oligonucleotide
uggaagacugugugcgacaaugcuu

SEQ ID NO: 12096 - RNA, 25 nt, Artificial Sequence
  Synthetic Oligonucleotide
auggaagauuuugugcgacaauguu

SEQ ID NO: 12097 - RNA, 25 nt, Artificial Sequence
  Synthetic Oligonucleotide
auggaagauuuugugcgacagugcu

SEQ ID NO: 12098 - RNA, 25 nt, Artificial Sequence
  Synthetic Oligonucleotide
auggaagauuuugugcgacgcugcu

SEQ ID NO: 12099 - RNA, 25 nt, Artificial Sequence
  Synthetic Oligonucleotide
auggaagauuuugugcggcaaugcu

SEQ ID NO: 12100 - RNA, 25 nt, Artificial Sequence
  Synthetic Oligonucleotide
auggaagauuuugugagacaaugcu

SEQ ID NO: 12101 - RNA, 25 nt, Artificial Sequence
  Synthetic Oligonucleotide
auggaagauuuugugggacaaugcu

SEQ ID NO: 12102 - RNA, 25 nt, Artificial Sequence
  Synthetic Oligonucleotide
auggaagauuuuguacgacaaugcu

SEQ ID NO: 12103 - RNA, 25 nt, Artificial Sequence
  Synthetic Oligonucleotide
auggaagauuucgugcgacaaugcu

SEQ ID NO: 12104 - RNA, 25 nt, Artificial Sequence
  Synthetic Oligonucleotide
auggaagaucuugugcgacaaugcu

SEQ ID NO: 12105 - RNA, 25 nt, Artificial Sequence
  Synthetic Oligonucleotide
auggaagaauuugugcgacaaugcu

SEQ ID NO: 12106 - RNA, 25 nt, Artificial Sequence
  Synthetic Oligonucleotide
auggaagacuuugugcgacaaugcu

SEQ ID NO: 12107 - RNA, 25 nt, Artificial Sequence
  Synthetic Oligonucleotide
auggaagacuuugugcgacagugcu

SEQ ID NO: 12108 - RNA, 25 nt, Artificial Sequence
  Synthetic Oligonucleotide
auggaggauuuugugcgacaaugcu

SEQ ID NO: 12109 - RNA, 25 nt, Artificial Sequence
  Synthetic Oligonucleotide
auggaagauuuuguacggcaaugcu

SEQ ID NO: 12110 - RNA, 25 nt, Artificial Sequence
  Synthetic Oligonucleotide
auggaagauuuugagggacaauggu

SEQ ID NO: 12111 - RNA, 25 nt, Artificial Sequence
  Synthetic Oligonucleotide
auggaagacuuugugcggcaaugcu

SEQ ID NO: 12112 - RNA, 25 nt, Artificial Sequence
  Synthetic Oligonucleotide
auggaagacugugugcgacaaugcu

SEQ ID NO: 12113 - RNA, 25 nt, Artificial Sequence
  Synthetic Oligonucleotide
ggaagauuuugugcgacaaugcuuu

SEQ ID NO: 12114 - RNA, 25 nt, Artificial Sequence
  Synthetic Oligonucleotide
ggaagauuuugugcgacaauguuuc

SEQ ID NO: 12115 - RNA, 25 nt, Artificial Sequence
  Synthetic Oligonucleotide
ggaagauuuugugcgacagugcuuc

SEQ ID NO: 12116 - RNA, 25 nt, Artificial Sequence
  Synthetic Oligonucleotide
ggaagauuuugugcggcaaugcuuc

SEQ ID NO: 12117 - RNA, 25 nt, Artificial Sequence
  Synthetic Oligonucleotide
ggaagauuuugugagacaaugcuuc

SEQ ID NO: 12118 - RNA, 25 nt, Artificial Sequence
  Synthetic Oligonucleotide
ggaagauuuugugggacaaugcuuc

SEQ ID NO: 12119 - RNA, 25 nt, Artificial Sequence
  Synthetic Oligonucleotide
ggaagauuuuguacgacaaugcuuu

SEQ ID NO: 12120 - RNA, 25 nt, Artificial Sequence
  Synthetic Oligonucleotide
ggaagauuucgugcgacaaugcuuc

SEQ ID NO: 12121 - RNA, 25 nt, Artificial Sequence
  Synthetic Oligonucleotide
ggaagaucuugugcgacaaugcuuc

SEQ ID NO: 12122 - RNA, 25 nt, Artificial Sequence
  Synthetic Oligonucleotide
ggaagaauuugugcgacaaugcuuc

SEQ ID NO: 12123 - RNA, 25 nt, Artificial Sequence
  Synthetic Oligonucleotide
ggaagacuuugugcgacaaugcuuc

SEQ ID NO: 12124 - RNA, 25 nt, Artificial Sequence
  Synthetic Oligonucleotide
ggaggauuuugugcgacaaugcuuc

SEQ ID NO: 12125 - RNA, 25 nt, Artificial Sequence
  Synthetic Oligonucleotide
ggaggauuuugugcgacaaugcuuu

SEQ ID NO: 12126 - RNA, 25 nt, Artificial Sequence
  Synthetic Oligonucleotide
gguagauuuugugcgacaaugcuuc

SEQ ID NO: 12127 - RNA, 25 nt, Artificial Sequence
  Synthetic Oligonucleotide
ggaagauuuugugcgacgcugcuuc

SEQ ID NO: 12128 - RNA, 25 nt, Artificial Sequence
  Synthetic Oligonucleotide
ggaagauuuuguacggcaaugcuuc

SEQ ID NO: 12129 - RNA, 25 nt, Artificial Sequence
  Synthetic Oligonucleotide
ggaagauuuugagggacaaugguuc

SEQ ID NO: 12130 - RNA, 25 nt, Artificial Sequence
  Synthetic Oligonucleotide
ggaagacuuugugcgacagugcuuc

SEQ ID NO: 12131 - RNA, 25 nt, Artificial Sequence
  Synthetic Oligonucleotide
ggaagacuuugugcggcaaugcuuc

SEQ ID NO: 12132 - RNA, 25 nt, Artificial Sequence
  Synthetic Oligonucleotide
ggaagacugugugcgacaaugcuuc

SEQ ID NO: 12133 - RNA, 25 nt, Artificial Sequence
  Synthetic Oligonucleotide
uuuagagccuauguggauggauuca

SEQ ID NO: 12134 - RNA, 25 nt, Artificial Sequence
  Synthetic Oligonucleotide
uuuagagccuauguggauggauuug

SEQ ID NO: 12135 - RNA, 25 nt, Artificial Sequence
  Synthetic Oligonucleotide
uuuagagccuauguggauggauuua

SEQ ID NO: 12136 - RNA, 25 nt, Artificial Sequence
  Synthetic Oligonucleotide
uuuagagccuauguggauggauacg

SEQ ID NO: 12137 - RNA, 25 nt, Artificial Sequence
  Synthetic Oligonucleotide
uuuagagccuauguggauggguucg

SEQ ID NO: 12138 - RNA, 25 nt, Artificial Sequence
  Synthetic Oligonucleotide
uuuagagccuauguggauagauucg

SEQ ID NO: 12139 - RNA, 25 nt, Artificial Sequence
  Synthetic Oligonucleotide
uuuagagccuauguagauggauucg

SEQ ID NO: 12140 - RNA, 25 nt, Artificial Sequence
  Synthetic Oligonucleotide
uuuagagccuauguagauggguucg

SEQ ID NO: 12141 - RNA, 25 nt, Artificial Sequence
  Synthetic Oligonucleotide
uuuagagcauauguggauggauucg

SEQ ID NO: 12142 - RNA, 25 nt, Artificial Sequence
  Synthetic Oligonucleotide
uuuagaaccuauguggauggauucg

SEQ ID NO: 12143 - RNA, 25 nt, Artificial Sequence
  Synthetic Oligonucleotide
uuuagaaccuauguggauggauuua

SEQ ID NO: 12144 - RNA, 25 nt, Artificial Sequence
  Synthetic Oligonucleotide
uuuaaagccuauguggauggauucg

SEQ ID NO: 12145 - RNA, 25 nt, Artificial Sequence
  Synthetic Oligonucleotide
uagagccuauguggauggauucgga

SEQ ID NO: 12146 - RNA, 25 nt, Artificial Sequence
  Synthetic Oligonucleotide
uagagccuauguggauggauucaaa

SEQ ID NO: 12147 - RNA, 25 nt, Artificial Sequence
  Synthetic Oligonucleotide
uagagccuauguggauggauuugaa

SEQ ID NO: 12148 - RNA, 25 nt, Artificial Sequence
  Synthetic Oligonucleotide
uagagccuauguggauggauuuaaa

SEQ ID NO: 12149 - RNA, 25 nt, Artificial Sequence
  Synthetic Oligonucleotide
uagagccuauguggauggauacgaa

SEQ ID NO: 12150 - RNA, 25 nt, Artificial Sequence
  Synthetic Oligonucleotide
uagagccuauguggauggguucgaa

SEQ ID NO: 12151 - RNA, 25 nt, Artificial Sequence
  Synthetic Oligonucleotide
uagagccuauguggauagauucgaa

SEQ ID NO: 12152 - RNA, 25 nt, Artificial Sequence
  Synthetic Oligonucleotide
uagagccuauguagauggauucgaa

SEQ ID NO: 12153 - RNA, 25 nt, Artificial Sequence
  Synthetic Oligonucleotide
uagagccuauguagauggauucgag

SEQ ID NO: 12154 - RNA, 25 nt, Artificial Sequence
  Synthetic Oligonucleotide
uagagcauauguggauggauucgaa

SEQ ID NO: 12155 - RNA, 25 nt, Artificial Sequence
  Synthetic Oligonucleotide
uagaaccuauguggauggauucgaa

SEQ ID NO: 12156 - RNA, 25 nt, Artificial Sequence
  Synthetic Oligonucleotide
uagaaccuauguggauggauuuaau

SEQ ID NO: 12157 - RNA, 25 nt, Artificial Sequence
  Synthetic Oligonucleotide
uaaagccuauguggauggauucgaa

SEQ ID NO: 12158 - RNA, 25 nt, Artificial Sequence
  Synthetic Oligonucleotide
uagagccuauguagauggguucgaa

SEQ ID NO: 12159 - RNA, 25 nt, Artificial Sequence
  Synthetic Oligonucleotide
uuagagccuauguggauggauucgg

SEQ ID NO: 12160 - RNA, 25 nt, Artificial Sequence
  Synthetic Oligonucleotide
uuagagccuauguggauggauucaa

SEQ ID NO: 12161 - RNA, 25 nt, Artificial Sequence
  Synthetic Oligonucleotide
uuagagccuauguggauggauuuga

SEQ ID NO: 12162 - RNA, 25 nt, Artificial Sequence
  Synthetic Oligonucleotide
uuagagccuauguggauggauuuaa

SEQ ID NO: 12163 - RNA, 25 nt, Artificial Sequence
  Synthetic Oligonucleotide
uuagagccuauguggauggauacga

SEQ ID NO: 12164 - RNA, 25 nt, Artificial Sequence
  Synthetic Oligonucleotide
uuagagccuauguggauggguucga

SEQ ID NO: 12165 - RNA, 25 nt, Artificial Sequence
  Synthetic Oligonucleotide
uuagagccuauguggauagauucga

SEQ ID NO: 12166 - RNA, 25 nt, Artificial Sequence
  Synthetic Oligonucleotide
uuagagccuauguagauggauucga

SEQ ID NO: 12167 - RNA, 25 nt, Artificial Sequence
  Synthetic Oligonucleotide
uuagagccuauguagauggguucga

SEQ ID NO: 12168 - RNA, 25 nt, Artificial Sequence
  Synthetic Oligonucleotide
uuagagcauauguggauggauucga

SEQ ID NO: 12169 - RNA, 25 nt, Artificial Sequence
  Synthetic Oligonucleotide
uuagaaccuauguggauggauucga

SEQ ID NO: 12170 - RNA, 25 nt, Artificial Sequence
  Synthetic Oligonucleotide
uuagaaccuauguggauggauuuaa

SEQ ID NO: 12171 - RNA, 25 nt, Artificial Sequence
  Synthetic Oligonucleotide
uuaaagccuauguggauggauucga

SEQ ID NO: 12172 - RNA, 25 nt, Artificial Sequence
  Synthetic Oligonucleotide
gagccuauguggauggauucgaaac

SEQ ID NO: 12173 - RNA, 25 nt, Artificial Sequence
  Synthetic Oligonucleotide
gagccuauguggauggauucgaauc

SEQ ID NO: 12174 - RNA, 25 nt, Artificial Sequence
  Synthetic Oligonucleotide
gagccuauguggauggauucggacc

SEQ ID NO: 12175 - RNA, 25 nt, Artificial Sequence
  Synthetic Oligonucleotide
gagccuauguggauggauucaaacc

SEQ ID NO: 12176 - RNA, 25 nt, Artificial Sequence
  Synthetic Oligonucleotide
gagccuauguggauggauuugaacc

SEQ ID NO: 12177 - RNA, 25 nt, Artificial Sequence
  Synthetic Oligonucleotide
gagccuauguggauggauuuaaacc

SEQ ID NO: 12178 - RNA, 25 nt, Artificial Sequence
  Synthetic Oligonucleotide
gagccuauguggauggauacgaacc

SEQ ID NO: 12179 - RNA, 25 nt, Artificial Sequence
  Synthetic Oligonucleotide
gagccuauguggauggguucgaacc

SEQ ID NO: 12180 - RNA, 25 nt, Artificial Sequence
  Synthetic Oligonucleotide
gagccuauguggauagauucgaacc

SEQ ID NO: 12181 - RNA, 25 nt, Artificial Sequence
  Synthetic Oligonucleotide
gagccuauguagauggauucgaacc

SEQ ID NO: 12182 - RNA, 25 nt, Artificial Sequence
  Synthetic Oligonucleotide
gagccuauguagauggauucgagcc

SEQ ID NO: 12183 - RNA, 25 nt, Artificial Sequence
  Synthetic Oligonucleotide
gagcauauguggauggauucgaacc

SEQ ID NO: 12184 - RNA, 25 nt, Artificial Sequence
  Synthetic Oligonucleotide
gaaccuauguggauggauucgaacc

SEQ ID NO: 12185 - RNA, 25 nt, Artificial Sequence
  Synthetic Oligonucleotide
gaaccuauguggauggauuuaaucc

SEQ ID NO: 12186 - RNA, 25 nt, Artificial Sequence
  Synthetic Oligonucleotide
aagccuauguggauggauucgaacc

SEQ ID NO: 12187 - RNA, 25 nt, Artificial Sequence
  Synthetic Oligonucleotide
gagccuauguagauggguucgaacc

SEQ ID NO: 12188 - RNA, 25 nt, Artificial Sequence
  Synthetic Oligonucleotide
agagccuauguggauggauucgaaa

SEQ ID NO: 12189 - RNA, 25 nt, Artificial Sequence
  Synthetic Oligonucleotide
agagccuauguggauggauucgaau

SEQ ID NO: 12190 - RNA, 25 nt, Artificial Sequence
  Synthetic Oligonucleotide
agagccuauguggauggauucggac

SEQ ID NO: 12191 - RNA, 25 nt, Artificial Sequence
  Synthetic Oligonucleotide
agagccuauguggauggauucaaac

SEQ ID NO: 12192 - RNA, 25 nt, Artificial Sequence
  Synthetic Oligonucleotide
agagccuauguggauggauuugaac

SEQ ID NO: 12193 - RNA, 25 nt, Artificial Sequence
  Synthetic Oligonucleotide
agagccuauguggauggauuuaaac

SEQ ID NO: 12194 - RNA, 25 nt, Artificial Sequence
  Synthetic Oligonucleotide
agagccuauguggauggauacgaac

SEQ ID NO: 12195 - RNA, 25 nt, Artificial Sequence
  Synthetic Oligonucleotide
agagccuauguggauggguucgaac

SEQ ID NO: 12196 - RNA, 25 nt, Artificial Sequence
  Synthetic Oligonucleotide
agagccuauguggauagauucgaac

SEQ ID NO: 12197 - RNA, 25 nt, Artificial Sequence
  Synthetic Oligonucleotide
agagccuauguagauggauucgaac

SEQ ID NO: 12198 - RNA, 25 nt, Artificial Sequence
  Synthetic Oligonucleotide
agagccuauguagauggauucgagc

SEQ ID NO: 12199 - RNA, 25 nt, Artificial Sequence
  Synthetic Oligonucleotide
agagcauauguggauggauucgaac

SEQ ID NO: 12200 - RNA, 25 nt, Artificial Sequence
  Synthetic Oligonucleotide
agaaccuauguggauggauucgaac

SEQ ID NO: 12201 - RNA, 25 nt, Artificial Sequence
  Synthetic Oligonucleotide
agaaccuauguggauggauuuaauc

SEQ ID NO: 12202 - RNA, 25 nt, Artificial Sequence
  Synthetic Oligonucleotide
aaagccuauguggauggauucgaac

SEQ ID NO: 12203 - RNA, 25 nt, Artificial Sequence
  Synthetic Oligonucleotide
agagccuauguagauggguucgaac

SEQ ID NO: 12204 - RNA, 25 nt, Artificial Sequence
  Synthetic Oligonucleotide
aaaugaaauggggaauggagcugag

SEQ ID NO: 12205 - RNA, 25 nt, Artificial Sequence
  Synthetic Oligonucleotide
aaaugaaauggggaauggaaaugag

SEQ ID NO: 12206 - RNA, 25 nt, Artificial Sequence
  Synthetic Oligonucleotide
aaaugaaauggggaauagagcugag

SEQ ID NO: 12207 - RNA, 25 nt, Artificial Sequence
  Synthetic Oligonucleotide
aaaugaaauggggcauggaaaugag

SEQ ID NO: 12208 - RNA, 25 nt, Artificial Sequence
  Synthetic Oligonucleotide
aaaugaaauggggcauggaagugag

SEQ ID NO: 12209 - RNA, 25 nt, Artificial Sequence
  Synthetic Oligonucleotide
aaaugaaaugggggauggagaugag

SEQ ID NO: 12210 - RNA, 25 nt, Artificial Sequence
  Synthetic Oligonucleotide
aaaugaaaugggggauggaaaugag

SEQ ID NO: 12211 - RNA, 25 nt, Artificial Sequence
  Synthetic Oligonucleotide
aaaugaaaugggguauggaaaugag

SEQ ID NO: 12212 - RNA, 25 nt, Artificial Sequence
  Synthetic Oligonucleotide
aaaugaaguggggaauggagaugag

SEQ ID NO: 12213 - RNA, 25 nt, Artificial Sequence
  Synthetic Oligonucleotide
agaugaaauggggaauggagaugag

SEQ ID NO: 12214 - RNA, 25 nt, Artificial Sequence
  Synthetic Oligonucleotide
aaaugaaguggggcauggaaaugag

SEQ ID NO: 12215 - RNA, 25 nt, Artificial Sequence
  Synthetic Oligonucleotide
aaaugaagugggguauggaaaugag

SEQ ID NO: 12216 - RNA, 25 nt, Artificial Sequence
  Synthetic Oligonucleotide
agaugaaauggggcauggagaugag

SEQ ID NO: 12217 - RNA, 25 nt, Artificial Sequence
  Synthetic Oligonucleotide
agaugaaauggggcauggaaaugag

SEQ ID NO: 12218 - RNA, 25 nt, Artificial Sequence
  Synthetic Oligonucleotide
agaugaaaugggggauggaaaugag

SEQ ID NO: 12219 - RNA, 25 nt, Artificial Sequence
  Synthetic Oligonucleotide
agaugaaaugggggauggauaugag

SEQ ID NO: 12220 - RNA, 25 nt, Artificial Sequence
  Synthetic Oligonucleotide
agaugaaaugggguauggaaaugag

SEQ ID NO: 12221 - RNA, 25 nt, Artificial Sequence
  Synthetic Oligonucleotide
aaaaugaaauggggaauggagcuga

SEQ ID NO: 12222 - RNA, 25 nt, Artificial Sequence
  Synthetic Oligonucleotide
aaaaugaaauggggaauggaaauga

SEQ ID NO: 12223 - RNA, 25 nt, Artificial Sequence
  Synthetic Oligonucleotide
aaaaugaaauggggaauagagcuga

SEQ ID NO: 12224 - RNA, 25 nt, Artificial Sequence
  Synthetic Oligonucleotide
aaaaugaaauggggcauggaaauga

SEQ ID NO: 12225 - RNA, 25 nt, Artificial Sequence
  Synthetic Oligonucleotide
aaaaugaaauggggcauggaaguga

SEQ ID NO: 12226 - RNA, 25 nt, Artificial Sequence
  Synthetic Oligonucleotide
aaaaugaaaugggggauggagauga

SEQ ID NO: 12227 - RNA, 25 nt, Artificial Sequence
  Synthetic Oligonucleotide
aaaaugaaaugggggauggaaauga

SEQ ID NO: 12228 - RNA, 25 nt, Artificial Sequence
  Synthetic Oligonucleotide
aaaaugaaaugggguauggaaauga

SEQ ID NO: 12229 - RNA, 25 nt, Artificial Sequence
  Synthetic Oligonucleotide
aaaaugaaguggggaauggagauga

SEQ ID NO: 12230 - RNA, 25 nt, Artificial Sequence
  Synthetic Oligonucleotide
aagaugaaauggggaauggagauga

SEQ ID NO: 12231 - RNA, 25 nt, Artificial Sequence
  Synthetic Oligonucleotide
aaaaugaaguggggcauggaaauga

SEQ ID NO: 12232 - RNA, 25 nt, Artificial Sequence
  Synthetic Oligonucleotide
aaaaugaagugggguauggaaauga

SEQ ID NO: 12233 - RNA, 25 nt, Artificial Sequence
  Synthetic Oligonucleotide
aagaugaaauggggcauggagauga

SEQ ID NO: 12234 - RNA, 25 nt, Artificial Sequence
  Synthetic Oligonucleotide
aagaugaaauggggcauggaaauga

SEQ ID NO: 12235 - RNA, 25 nt, Artificial Sequence
  Synthetic Oligonucleotide
aagaugaaaugggggauggaaauga

SEQ ID NO: 12236 - RNA, 25 nt, Artificial Sequence
  Synthetic Oligonucleotide
aagaugaaaugggggauggauauga

SEQ ID NO: 12237 - RNA, 25 nt, Artificial Sequence
  Synthetic Oligonucleotide
aagaugaaaugggguauggaaauga

SEQ ID NO: 12238 - RNA, 25 nt, Artificial Sequence
  Synthetic Oligonucleotide
ccuauguggauggauucgaaccaaa

SEQ ID NO: 12239 - RNA, 25 nt, Artificial Sequence
  Synthetic Oligonucleotide
ccuauguggauggauucgaacccaa

SEQ ID NO: 12240 - RNA, 25 nt, Artificial Sequence
  Synthetic Oligonucleotide
ccuauguggauggauucgaaacgaa

SEQ ID NO: 12241 - RNA, 25 nt, Artificial Sequence
  Synthetic Oligonucleotide
ccuauguggauggauucgaaucgaa

SEQ ID NO: 12242 - RNA, 25 nt, Artificial Sequence
  Synthetic Oligonucleotide
ccuauguggauggauucggaccgaa

SEQ ID NO: 12243 - RNA, 25 nt, Artificial Sequence
  Synthetic Oligonucleotide
ccuauguggauggauucaaaccgaa

SEQ ID NO: 12244 - RNA, 25 nt, Artificial Sequence
  Synthetic Oligonucleotide
ccuauguggauggauuugaaccgaa

SEQ ID NO: 12245 - RNA, 25 nt, Artificial Sequence
  Synthetic Oligonucleotide
ccuauguggauggauuugaaccaaa

SEQ ID NO: 12246 - RNA, 25 nt, Artificial Sequence
  Synthetic Oligonucleotide
ccuauguggauggauacgaaccgaa

SEQ ID NO: 12247 - RNA, 25 nt, Artificial Sequence
  Synthetic Oligonucleotide
ccuauguggauggguucgaaccgaa

SEQ ID NO: 12248 - RNA, 25 nt, Artificial Sequence
  Synthetic Oligonucleotide
ccuauguggauggguucgaaccaaa

SEQ ID NO: 12249 - RNA, 25 nt, Artificial Sequence
  Synthetic Oligonucleotide
ccuauguggauagauucgaaccgaa

SEQ ID NO: 12250 - RNA, 25 nt, Artificial Sequence
  Synthetic Oligonucleotide
ccuauguagauggauucgaaccgaa

SEQ ID NO: 12251 - RNA, 25 nt, Artificial Sequence
  Synthetic Oligonucleotide
ccuauguagauggauucgagccgaa

SEQ ID NO: 12252 - RNA, 25 nt, Artificial Sequence
  Synthetic Oligonucleotide
cauauguggauggauucgaaccgaa

SEQ ID NO: 12253 - RNA, 25 nt, Artificial Sequence
  Synthetic Oligonucleotide
ccuauguggauggauuuaaaccgaa

SEQ ID NO: 12254 - RNA, 25 nt, Artificial Sequence
  Synthetic Oligonucleotide
ccuauguggauggauuuaauccgaa

SEQ ID NO: 12255 - RNA, 25 nt, Artificial Sequence
  Synthetic Oligonucleotide
ccuauguagauggguucgaaccaaa

SEQ ID NO: 12256 - RNA, 25 nt, Artificial Sequence
  Synthetic Oligonucleotide
uauguggauggauucgaaccgaaug

SEQ ID NO: 12257 - RNA, 25 nt, Artificial Sequence
  Synthetic Oligonucleotide
uauguggauggauucgaaccaaacg

SEQ ID NO: 12258 - RNA, 25 nt, Artificial Sequence
  Synthetic Oligonucleotide
uauguggauggauucgaacccaacg

SEQ ID NO: 12259 - RNA, 25 nt, Artificial Sequence
  Synthetic Oligonucleotide
uauguggauggauucgaaacgaacg

SEQ ID NO: 12260 - RNA, 25 nt, Artificial Sequence
  Synthetic Oligonucleotide
uauguggauggauucgaaucgaacg

SEQ ID NO: 12261 - RNA, 25 nt, Artificial Sequence
  Synthetic Oligonucleotide
uauguggauggauucggaccgaacg

SEQ ID NO: 12262 - RNA, 25 nt, Artificial Sequence
  Synthetic Oligonucleotide
uauguggauggauucaaaccgaacg

SEQ ID NO: 12263 - RNA, 25 nt, Artificial Sequence
  Synthetic Oligonucleotide
uauguggauggauuugaaccgaacg

SEQ ID NO: 12264 - RNA, 25 nt, Artificial Sequence
  Synthetic Oligonucleotide
uauguggauggauuugaaccaaacg

SEQ ID NO: 12265 - RNA, 25 nt, Artificial Sequence
  Synthetic Oligonucleotide
uauguggauggauacgaaccgaacg

SEQ ID NO: 12266 - RNA, 25 nt, Artificial Sequence
  Synthetic Oligonucleotide
uauguggauggguucgaaccgaacg

SEQ ID NO: 12267 - RNA, 25 nt, Artificial Sequence
  Synthetic Oligonucleotide
uauguggauggguucgaaccaaacg

SEQ ID NO: 12268 - RNA, 25 nt, Artificial Sequence
  Synthetic Oligonucleotide
uauguggauagauucgaaccgaacg

SEQ ID NO: 12269 - RNA, 25 nt, Artificial Sequence
  Synthetic Oligonucleotide
uauguagauggauucgaaccgaacg

SEQ ID NO: 12270 - RNA, 25 nt, Artificial Sequence
  Synthetic Oligonucleotide
uauguggauggauuuaaaccgaacg

SEQ ID NO: 12271 - RNA, 25 nt, Artificial Sequence
  Synthetic Oligonucleotide
uauguagauggauucgagccgaacg

SEQ ID NO: 12272 - RNA, 25 nt, Artificial Sequence
  Synthetic Oligonucleotide
uauguagauggguucgaaccaaacg

SEQ ID NO: 12273 - RNA, 25 nt, Artificial Sequence
  Synthetic Oligonucleotide
uauguggauggauuuaauccgaacg

SEQ ID NO: 12274 - RNA, 25 nt, Artificial Sequence
  Synthetic Oligonucleotide
auguggauggauucgaaccgaaugg

SEQ ID NO: 12275 - RNA, 25 nt, Artificial Sequence
  Synthetic Oligonucleotide
auguggauggauucgaaccaaacgg

SEQ ID NO: 12276 - RNA, 25 nt, Artificial Sequence
  Synthetic Oligonucleotide
auguggauggauucgaacccaacgg

SEQ ID NO: 12277 - RNA, 25 nt, Artificial Sequence
  Synthetic Oligonucleotide
auguggauggauucgaaacgaacgg

SEQ ID NO: 12278 - RNA, 25 nt, Artificial Sequence
  Synthetic Oligonucleotide
auguggauggauucgaaucgaacgg

SEQ ID NO: 12279 - RNA, 25 nt, Artificial Sequence
  Synthetic Oligonucleotide
auguggauggauucggaccgaacgg

SEQ ID NO: 12280 - RNA, 25 nt, Artificial Sequence
  Synthetic Oligonucleotide
auguggauggauucaaaccgaacgg

SEQ ID NO: 12281 - RNA, 25 nt, Artificial Sequence
  Synthetic Oligonucleotide
auguggauggauuugaaccgaacgg

SEQ ID NO: 12282 - RNA, 25 nt, Artificial Sequence
  Synthetic Oligonucleotide
auguggauggauuugaaccaaacgg

SEQ ID NO: 12283 - RNA, 25 nt, Artificial Sequence
  Synthetic Oligonucleotide
auguggauggauacgaaccgaacgg

SEQ ID NO: 12284 - RNA, 25 nt, Artificial Sequence
  Synthetic Oligonucleotide
auguggauggguucgaaccgaacgg

SEQ ID NO: 12285 - RNA, 25 nt, Artificial Sequence
  Synthetic Oligonucleotide
auguggauggguucgaaccaaacgg

SEQ ID NO: 12286 - RNA, 25 nt, Artificial Sequence
  Synthetic Oligonucleotide
auguggauagauucgaaccgaacgg

SEQ ID NO: 12287 - RNA, 25 nt, Artificial Sequence
  Synthetic Oligonucleotide
auguagauggauucgaaccgaacgg

SEQ ID NO: 12288 - RNA, 25 nt, Artificial Sequence
  Synthetic Oligonucleotide
auguggauggauuuaaaccgaacgg

SEQ ID NO: 12289 - RNA, 25 nt, Artificial Sequence
  Synthetic Oligonucleotide
auguagauggauucgagccgaacgg

SEQ ID NO: 12290 - RNA, 25 nt, Artificial Sequence
  Synthetic Oligonucleotide
auguagauggguucgaaccaaacgg

SEQ ID NO: 12291 - RNA, 25 nt, Artificial Sequence
  Synthetic Oligonucleotide
auguggauggauuuaauccgaacgg

SEQ ID NO: 12292 - RNA, 25 nt, Artificial Sequence
  Synthetic Oligonucleotide
cuauguggauggauucgaaccgaau

SEQ ID NO: 12293 - RNA, 25 nt, Artificial Sequence
  Synthetic Oligonucleotide
cuauguggauggauucgaaccaaac

SEQ ID NO: 12294 - RNA, 25 nt, Artificial Sequence
  Synthetic Oligonucleotide
cuauguggauggauucgaacccaac

SEQ ID NO: 12295 - RNA, 25 nt, Artificial Sequence
  Synthetic Oligonucleotide
cuauguggauggauucgaaacgaac

SEQ ID NO: 12296 - RNA, 25 nt, Artificial Sequence
  Synthetic Oligonucleotide
cuauguggauggauucgaaucgaac

SEQ ID NO: 12297 - RNA, 25 nt, Artificial Sequence
  Synthetic Oligonucleotide
cuauguggauggauucggaccgaac

SEQ ID NO: 12298 - RNA, 25 nt, Artificial Sequence
  Synthetic Oligonucleotide
cuauguggauggauucaaaccgaac

SEQ ID NO: 12299 - RNA, 25 nt, Artificial Sequence
  Synthetic Oligonucleotide
cuauguggauggauuugaaccgaac

SEQ ID NO: 12300 - RNA, 25 nt, Artificial Sequence
  Synthetic Oligonucleotide
cuauguggauggauuugaaccaaac

SEQ ID NO: 12301 - RNA, 25 nt, Artificial Sequence
  Synthetic Oligonucleotide
cuauguggauggauacgaaccgaac

SEQ ID NO: 12302 - RNA, 25 nt, Artificial Sequence
  Synthetic Oligonucleotide
cuauguggauggguucgaaccgaac

SEQ ID NO: 12303 - RNA, 25 nt, Artificial Sequence
  Synthetic Oligonucleotide
cuauguggauggguucgaaccaaac

SEQ ID NO: 12304 - RNA, 25 nt, Artificial Sequence
  Synthetic Oligonucleotide
cuauguggauagauucgaaccgaac

SEQ ID NO: 12305 - RNA, 25 nt, Artificial Sequence
  Synthetic Oligonucleotide
cuauguagauggauucgaaccgaac

SEQ ID NO: 12306 - RNA, 25 nt, Artificial Sequence
  Synthetic Oligonucleotide
auauguggauggauucgaaccgaac

SEQ ID NO: 12307 - RNA, 25 nt, Artificial Sequence
  Synthetic Oligonucleotide
cuauguggauggauuuaaaccgaac

SEQ ID NO: 12308 - RNA, 25 nt, Artificial Sequence
  Synthetic Oligonucleotide
cuauguagauggauucgagccgaac

SEQ ID NO: 12309 - RNA, 25 nt, Artificial Sequence
  Synthetic Oligonucleotide
cuauguagauggguucgaaccaaac

SEQ ID NO: 12310 - RNA, 25 nt, Artificial Sequence
  Synthetic Oligonucleotide
cuauguggauggauuuaauccgaac

SEQ ID NO: 12311 - RNA, 25 nt, Artificial Sequence
  Synthetic Oligonucleotide
agccuauguggauggauucgaacca

SEQ ID NO: 12312 - RNA, 25 nt, Artificial Sequence
  Synthetic Oligonucleotide
agccuauguggauggauucgaaccc

SEQ ID NO: 12313 - RNA, 25 nt, Artificial Sequence
  Synthetic Oligonucleotide
agccuauguggauggauucgaaacg

SEQ ID NO: 12314 - RNA, 25 nt, Artificial Sequence
  Synthetic Oligonucleotide
agccuauguggauggauucgaaucg

SEQ ID NO: 12315 - RNA, 25 nt, Artificial Sequence
  Synthetic Oligonucleotide
agccuauguggauggauucggaccg

SEQ ID NO: 12316 - RNA, 25 nt, Artificial Sequence
  Synthetic Oligonucleotide
agccuauguggauggauucaaaccg

SEQ ID NO: 12317 - RNA, 25 nt, Artificial Sequence
  Synthetic Oligonucleotide
agccuauguggauggauuugaaccg

SEQ ID NO: 12318 - RNA, 25 nt, Artificial Sequence
  Synthetic Oligonucleotide
agccuauguggauggauuugaacca

SEQ ID NO: 12319 - RNA, 25 nt, Artificial Sequence
  Synthetic Oligonucleotide
agccuauguggauggauuuaaaccg

SEQ ID NO: 12320 - RNA, 25 nt, Artificial Sequence
  Synthetic Oligonucleotide
agccuauguggauggauacgaaccg

SEQ ID NO: 12321 - RNA, 25 nt, Artificial Sequence
  Synthetic Oligonucleotide
agccuauguggauggguucgaaccg

SEQ ID NO: 12322 - RNA, 25 nt, Artificial Sequence
  Synthetic Oligonucleotide
agccuauguggauggguucgaacca

SEQ ID NO: 12323 - RNA, 25 nt, Artificial Sequence
  Synthetic Oligonucleotide
agccuauguggauagauucgaaccg

SEQ ID NO: 12324 - RNA, 25 nt, Artificial Sequence
  Synthetic Oligonucleotide
agccuauguagauggauucgaaccg

SEQ ID NO: 12325 - RNA, 25 nt, Artificial Sequence
  Synthetic Oligonucleotide
agccuauguagauggauucgagccg

SEQ ID NO: 12326 - RNA, 25 nt, Artificial Sequence
  Synthetic Oligonucleotide
agcauauguggauggauucgaaccg

SEQ ID NO: 12327 - RNA, 25 nt, Artificial Sequence
  Synthetic Oligonucleotide
aaccuauguggauggauucgaaccg

SEQ ID NO: 12328 - RNA, 25 nt, Artificial Sequence
  Synthetic Oligonucleotide
agccuauguagauggguucgaacca

SEQ ID NO: 12329 - RNA, 25 nt, Artificial Sequence
  Synthetic Oligonucleotide
aaccuauguggauggauuuaauccg

SEQ ID NO: 12330 - RNA, 25 nt, Artificial Sequence
  Synthetic Oligonucleotide
gccuauguggauggauucgaaccaa

SEQ ID NO: 12331 - RNA, 25 nt, Artificial Sequence
  Synthetic Oligonucleotide
gccuauguggauggauucgaaccca

SEQ ID NO: 12332 - RNA, 25 nt, Artificial Sequence
  Synthetic Oligonucleotide
gccuauguggauggauucgaaacga

SEQ ID NO: 12333 - RNA, 25 nt, Artificial Sequence
  Synthetic Oligonucleotide
gccuauguggauggauucgaaucga

SEQ ID NO: 12334 - RNA, 25 nt, Artificial Sequence
  Synthetic Oligonucleotide
gccuauguggauggauucggaccga

SEQ ID NO: 12335 - RNA, 25 nt, Artificial Sequence
  Synthetic Oligonucleotide
gccuauguggauggauucaaaccga

SEQ ID NO: 12336 - RNA, 25 nt, Artificial Sequence
  Synthetic Oligonucleotide
gccuauguggauggauuugaaccga

SEQ ID NO: 12337 - RNA, 25 nt, Artificial Sequence
  Synthetic Oligonucleotide
gccuauguggauggauuugaaccaa

SEQ ID NO: 12338 - RNA, 25 nt, Artificial Sequence
  Synthetic Oligonucleotide
gccuauguggauggauacgaaccga

SEQ ID NO: 12339 - RNA, 25 nt, Artificial Sequence
  Synthetic Oligonucleotide
gccuauguggauggguucgaaccga

SEQ ID NO: 12340 - RNA, 25 nt, Artificial Sequence
  Synthetic Oligonucleotide
gccuauguggauggguucgaaccaa

SEQ ID NO: 12341 - RNA, 25 nt, Artificial Sequence
  Synthetic Oligonucleotide
gccuauguggauagauucgaaccga

SEQ ID NO: 12342 - RNA, 25 nt, Artificial Sequence
  Synthetic Oligonucleotide
gccuauguagauggauucgaaccga

SEQ ID NO: 12343 - RNA, 25 nt, Artificial Sequence
  Synthetic Oligonucleotide
gccuauguagauggauucgagccga

SEQ ID NO: 12344 - RNA, 25 nt, Artificial Sequence
  Synthetic Oligonucleotide
gcauauguggauggauucgaaccga

SEQ ID NO: 12345 - RNA, 25 nt, Artificial Sequence
  Synthetic Oligonucleotide
accuauguggauggauucgaaccga

SEQ ID NO: 12346 - RNA, 25 nt, Artificial Sequence
  Synthetic Oligonucleotide
gccuauguggauggauuuaaaccga

SEQ ID NO: 12347 - RNA, 25 nt, Artificial Sequence
  Synthetic Oligonucleotide
gccuauguagauggguucgaaccaa

SEQ ID NO: 12348 - RNA, 25 nt, Artificial Sequence
  Synthetic Oligonucleotide
accuauguggauggauuuaauccga

SEQ ID NO: 12349 - RNA, 25 nt, Artificial Sequence
  Synthetic Oligonucleotide
uguggauggauucgaaccgaacgga

SEQ ID NO: 12350 - RNA, 25 nt, Artificial Sequence
  Synthetic Oligonucleotide
uguggauggauucgaaccgaacggu

SEQ ID NO: 12351 - RNA, 25 nt, Artificial Sequence
  Synthetic Oligonucleotide
uguggauggauucgaaccgaauggc

SEQ ID NO: 12352 - RNA, 25 nt, Artificial Sequence
  Synthetic Oligonucleotide
uguggauggauucgaaccaaacggc

SEQ ID NO: 12353 - RNA, 25 nt, Artificial Sequence
  Synthetic Oligonucleotide
uguggauggauucgaacccaacggc

SEQ ID NO: 12354 - RNA, 25 nt, Artificial Sequence
  Synthetic Oligonucleotide
uguggauggauucgaaacgaacggc

SEQ ID NO: 12355 - RNA, 25 nt, Artificial Sequence
  Synthetic Oligonucleotide
uguggauggauucgaaucgaacggc

SEQ ID NO: 12356 - RNA, 25 nt, Artificial Sequence
  Synthetic Oligonucleotide
uguggauggauucggaccgaacggc

SEQ ID NO: 12357 - RNA, 25 nt, Artificial Sequence
  Synthetic Oligonucleotide
uguggauggauucaaaccgaacggc

SEQ ID NO: 12358 - RNA, 25 nt, Artificial Sequence
  Synthetic Oligonucleotide
uguggauggauuugaaccgaacggc

SEQ ID NO: 12359 - RNA, 25 nt, Artificial Sequence
  Synthetic Oligonucleotide
uguggauggauuugaaccgaacgga

SEQ ID NO: 12360 - RNA, 25 nt, Artificial Sequence
  Synthetic Oligonucleotide
uguggauggauacgaaccgaacggc

SEQ ID NO: 12361 - RNA, 25 nt, Artificial Sequence
  Synthetic Oligonucleotide
uguggauggguucgaaccgaacggc

SEQ ID NO: 12362 - RNA, 25 nt, Artificial Sequence
  Synthetic Oligonucleotide
uguggauagauucgaaccgaacggc

SEQ ID NO: 12363 - RNA, 25 nt, Artificial Sequence
  Synthetic Oligonucleotide
uguagauggauucgaaccgaacggc

SEQ ID NO: 12364 - RNA, 25 nt, Artificial Sequence
  Synthetic Oligonucleotide
uguggauggauuugaaccaaacggc

SEQ ID NO: 12365 - RNA, 25 nt, Artificial Sequence
  Synthetic Oligonucleotide
uguggauggauuuaaaccgaacggc

SEQ ID NO: 12366 - RNA, 25 nt, Artificial Sequence
  Synthetic Oligonucleotide
uguggauggguucgaaccaaacggc

SEQ ID NO: 12367 - RNA, 25 nt, Artificial Sequence
  Synthetic Oligonucleotide
uguagauggauucgagccgaacggc

SEQ ID NO: 12368 - RNA, 25 nt, Artificial Sequence
  Synthetic Oligonucleotide
uguggauggauuuaauccgaacggc

SEQ ID NO: 12369 - RNA, 25 nt, Artificial Sequence
  Synthetic Oligonucleotide
uguagauggguucgaaccaaacggc

SEQ ID NO: 12370 - RNA, 25 nt, Artificial Sequence
  Synthetic Oligonucleotide
guggauggauucgaaccgaacggau

SEQ ID NO: 12371 - RNA, 25 nt, Artificial Sequence
  Synthetic Oligonucleotide
guggauggauucgaaccgaacgguu

SEQ ID NO: 12372 - RNA, 25 nt, Artificial Sequence
  Synthetic Oligonucleotide
guggauggauucgaaccgaauggcu

SEQ ID NO: 12373 - RNA, 25 nt, Artificial Sequence
  Synthetic Oligonucleotide
guggauggauucgaaccaaacggcu

SEQ ID NO: 12374 - RNA, 25 nt, Artificial Sequence
  Synthetic Oligonucleotide
guggauggauucgaacccaacggcu

SEQ ID NO: 12375 - RNA, 25 nt, Artificial Sequence
  Synthetic Oligonucleotide
guggauggauucgaaacgaacggcu

SEQ ID NO: 12376 - RNA, 25 nt, Artificial Sequence
  Synthetic Oligonucleotide
guggauggauucgaaucgaacggcu

SEQ ID NO: 12377 - RNA, 25 nt, Artificial Sequence
  Synthetic Oligonucleotide
guggauggauucggaccgaacggcu

SEQ ID NO: 12378 - RNA, 25 nt, Artificial Sequence
  Synthetic Oligonucleotide
guggauggauucaaaccgaacggcu

SEQ ID NO: 12379 - RNA, 25 nt, Artificial Sequence
  Synthetic Oligonucleotide
guggauggauuugaaccgaacggcu

SEQ ID NO: 12380 - RNA, 25 nt, Artificial Sequence
  Synthetic Oligonucleotide
guggauggauuugaaccgaacggau

SEQ ID NO: 12381 - RNA, 25 nt, Artificial Sequence
  Synthetic Oligonucleotide
guggauggauacgaaccgaacggcu

SEQ ID NO: 12382 - RNA, 25 nt, Artificial Sequence
  Synthetic Oligonucleotide
guggauggguucgaaccgaacggcu

SEQ ID NO: 12383 - RNA, 25 nt, Artificial Sequence
  Synthetic Oligonucleotide
guggauagauucgaaccgaacggcu

SEQ ID NO: 12384 - RNA, 25 nt, Artificial Sequence
  Synthetic Oligonucleotide
guagauggauucgaaccgaacggcu

SEQ ID NO: 12385 - RNA, 25 nt, Artificial Sequence
  Synthetic Oligonucleotide
guggauggauuugaaccaaacggcu

SEQ ID NO: 12386 - RNA, 25 nt, Artificial Sequence
  Synthetic Oligonucleotide
guggauggauuuaaaccgaacggcu

SEQ ID NO: 12387 - RNA, 25 nt, Artificial Sequence
  Synthetic Oligonucleotide
guggauggguucgaaccaaacggcu

SEQ ID NO: 12388 - RNA, 25 nt, Artificial Sequence
  Synthetic Oligonucleotide
guagauggauucgagccgaacggcu

SEQ ID NO: 12389 - RNA, 25 nt, Artificial Sequence
  Synthetic Oligonucleotide
guggauggauuuaauccgaacggcu

SEQ ID NO: 12390 - RNA, 25 nt, Artificial Sequence
  Synthetic Oligonucleotide
guagauggguucgaaccaaacggcu

SEQ ID NO: 12391 - RNA, 25 nt, Artificial Sequence
  Synthetic Oligonucleotide
uaagcgauuugaagcaauaugauaa

SEQ ID NO: 12392 - RNA, 25 nt, Artificial Sequence
  Synthetic Oligonucleotide
uaagcgauuugaagcaauaugacag

SEQ ID NO: 12393 - RNA, 25 nt, Artificial Sequence
  Synthetic Oligonucleotide
uaagcgauuugaagcaauauaauag

SEQ ID NO: 12394 - RNA, 25 nt, Artificial Sequence
  Synthetic Oligonucleotide
uaagcgauuugaagcaauauuauag

SEQ ID NO: 12395 - RNA, 25 nt, Artificial Sequence
  Synthetic Oligonucleotide
uaagcgauuugaagcaauacgauag

SEQ ID NO: 12396 - RNA, 25 nt, Artificial Sequence
  Synthetic Oligonucleotide
uaagcgauuugaagcaguaugauag

SEQ ID NO: 12397 - RNA, 25 nt, Artificial Sequence
  Synthetic Oligonucleotide
uaagcgauuugaaacaauaugauag

SEQ ID NO: 12398 - RNA, 25 nt, Artificial Sequence
  Synthetic Oligonucleotide
uaagcgauuugaggcaauaugauag

SEQ ID NO: 12399 - RNA, 25 nt, Artificial Sequence
  Synthetic Oligonucleotide
uaagcgauuuaaagcaauaugauag

SEQ ID NO: 12400 - RNA, 25 nt, Artificial Sequence
  Synthetic Oligonucleotide
uaagcgaucugaagcaauaugauag

SEQ ID NO: 12401 - RNA, 25 nt, Artificial Sequence
  Synthetic Oligonucleotide
uaagcgacuugaagcaauaugauag

SEQ ID NO: 12402 - RNA, 25 nt, Artificial Sequence
  Synthetic Oligonucleotide
uaagcgacuugaagcaauauuauag

SEQ ID NO: 12403 - RNA, 25 nt, Artificial Sequence
  Synthetic Oligonucleotide
uaagugauuugaagcaauaugauag

SEQ ID NO: 12404 - RNA, 25 nt, Artificial Sequence
  Synthetic Oligonucleotide
uaaacgauuugaagcaauaugauag

SEQ ID NO: 12405 - RNA, 25 nt, Artificial Sequence
  Synthetic Oligonucleotide
uaaucgauuugaagcaauaugauag

SEQ ID NO: 12406 - RNA, 25 nt, Artificial Sequence
  Synthetic Oligonucleotide
uaggcgauuugaagcaauaugauag

SEQ ID NO: 12407 - RNA, 25 nt, Artificial Sequence
  Synthetic Oligonucleotide
ugagcgauuugaagcaauaugauag

SEQ ID NO: 12408 - RNA, 25 nt, Artificial Sequence
  Synthetic Oligonucleotide
uuagcgauuugaagcaauaugauag

SEQ ID NO: 12409 - RNA, 25 nt, Artificial Sequence
  Synthetic Oligonucleotide
caagcgauuugaagcaauaugauag

SEQ ID NO: 12410 - RNA, 25 nt, Artificial Sequence
  Synthetic Oligonucleotide
uaggcgacuugaagcaauaugauag

SEQ ID NO: 12411 - RNA, 25 nt, Artificial Sequence
  Synthetic Oligonucleotide
uaggugauuugaagcaauaugauag

SEQ ID NO: 12412 - RNA, 25 nt, Artificial Sequence
  Synthetic Oligonucleotide
ucagcgauuuaaagcaauaugauag

SEQ ID NO: 12413 - RNA, 25 nt, Artificial Sequence
  Synthetic Oligonucleotide
gcgauuugaagcaauaugauaguaa

SEQ ID NO: 12414 - RNA, 25 nt, Artificial Sequence
  Synthetic Oligonucleotide
gcgauuugaagcaauaugauagcga

SEQ ID NO: 12415 - RNA, 25 nt, Artificial Sequence
  Synthetic Oligonucleotide
gcgauuugaagcaauaugauaauga

SEQ ID NO: 12416 - RNA, 25 nt, Artificial Sequence
  Synthetic Oligonucleotide
gcgauuugaagcaauaugacaguga

SEQ ID NO: 12417 - RNA, 25 nt, Artificial Sequence
  Synthetic Oligonucleotide
gcgauuugaagcaauaugacagcga

SEQ ID NO: 12418 - RNA, 25 nt, Artificial Sequence
  Synthetic Oligonucleotide
gcgauuugaagcaauauaauaguga

SEQ ID NO: 12419 - RNA, 25 nt, Artificial Sequence
  Synthetic Oligonucleotide
gcgauuugaagcaauauuauaguga

SEQ ID NO: 12420 - RNA, 25 nt, Artificial Sequence
  Synthetic Oligonucleotide
gcgauuugaagcaauacgauaguga

SEQ ID NO: 12421 - RNA, 25 nt, Artificial Sequence
  Synthetic Oligonucleotide
gcgauuugaagcaguaugauaguga

SEQ ID NO: 12422 - RNA, 25 nt, Artificial Sequence
  Synthetic Oligonucleotide
gcgauuugaaacaauaugauaguga

SEQ ID NO: 12423 - RNA, 25 nt, Artificial Sequence
  Synthetic Oligonucleotide
gcgauuugaggcaauaugauaguga

SEQ ID NO: 12424 - RNA, 25 nt, Artificial Sequence
  Synthetic Oligonucleotide
gcgauuuaaagcaauaugauaguga

SEQ ID NO: 12425 - RNA, 25 nt, Artificial Sequence
  Synthetic Oligonucleotide
gcgaucugaagcaauaugauaguga

SEQ ID NO: 12426 - RNA, 25 nt, Artificial Sequence
  Synthetic Oligonucleotide
gcgacuugaagcaauaugauaguga

SEQ ID NO: 12427 - RNA, 25 nt, Artificial Sequence
  Synthetic Oligonucleotide
gugauuugaagcaauaugauaguga

SEQ ID NO: 12428 - RNA, 25 nt, Artificial Sequence
  Synthetic Oligonucleotide
acgauuugaagcaauaugauaguga

SEQ ID NO: 12429 - RNA, 25 nt, Artificial Sequence
  Synthetic Oligonucleotide
ucgauuugaagcaauaugauaguga

SEQ ID NO: 12430 - RNA, 25 nt, Artificial Sequence
  Synthetic Oligonucleotide
gcgacuugaagcaauauuauaguga

SEQ ID NO: 12431 - RNA, 25 nt, Artificial Sequence
  Synthetic Oligonucleotide
gugauuuaaaacaauaugacaguga

SEQ ID NO: 12432 - RNA, 25 nt, Artificial Sequence
  Synthetic Oligonucleotide
agcgauuugaagcaauaugauagua

SEQ ID NO: 12433 - RNA, 25 nt, Artificial Sequence
  Synthetic Oligonucleotide
agcgauuugaagcaauaugauagcg

SEQ ID NO: 12434 - RNA, 25 nt, Artificial Sequence
  Synthetic Oligonucleotide
agcgauuugaagcaauaugauaaug

SEQ ID NO: 12435 - RNA, 25 nt, Artificial Sequence
  Synthetic Oligonucleotide
agcgauuugaagcaauaugacagug

SEQ ID NO: 12436 - RNA, 25 nt, Artificial Sequence
  Synthetic Oligonucleotide
agcgauuugaagcaauaugacagcg

SEQ ID NO: 12437 - RNA, 25 nt, Artificial Sequence
  Synthetic Oligonucleotide
agcgauuugaagcaauauaauagug

SEQ ID NO: 12438 - RNA, 25 nt, Artificial Sequence
  Synthetic Oligonucleotide
agcgauuugaagcaauauuauagug

SEQ ID NO: 12439 - RNA, 25 nt, Artificial Sequence
  Synthetic Oligonucleotide
agcgauuugaagcaauacgauagug

SEQ ID NO: 12440 - RNA, 25 nt, Artificial Sequence
  Synthetic Oligonucleotide
agcgauuugaagcaguaugauagug

SEQ ID NO: 12441 - RNA, 25 nt, Artificial Sequence
  Synthetic Oligonucleotide
agcgauuugaaacaauaugauagug

SEQ ID NO: 12442 - RNA, 25 nt, Artificial Sequence
  Synthetic Oligonucleotide
agcgauuugaggcaauaugauagug

SEQ ID NO: 12443 - RNA, 25 nt, Artificial Sequence
  Synthetic Oligonucleotide
agcgauuuaaagcaauaugauagug

SEQ ID NO: 12444 - RNA, 25 nt, Artificial Sequence
  Synthetic Oligonucleotide
agcgaucugaagcaauaugauagug

SEQ ID NO: 12445 - RNA, 25 nt, Artificial Sequence
  Synthetic Oligonucleotide
agcgacuugaagcaauaugauagug

SEQ ID NO: 12446 - RNA, 25 nt, Artificial Sequence
  Synthetic Oligonucleotide
agugauuugaagcaauaugauagug

SEQ ID NO: 12447 - RNA, 25 nt, Artificial Sequence
  Synthetic Oligonucleotide
aacgauuugaagcaauaugauagug

SEQ ID NO: 12448 - RNA, 25 nt, Artificial Sequence
  Synthetic Oligonucleotide
aucgauuugaagcaauaugauagug

SEQ ID NO: 12449 - RNA, 25 nt, Artificial Sequence
  Synthetic Oligonucleotide
ggcgauuugaagcaauaugauagug

SEQ ID NO: 12450 - RNA, 25 nt, Artificial Sequence
  Synthetic Oligonucleotide
agcgacuugaagcaauauuauagug

SEQ ID NO: 12451 - RNA, 25 nt, Artificial Sequence
  Synthetic Oligonucleotide
ggcgacuugaagcaauaugauagug

SEQ ID NO: 12452 - RNA, 25 nt, Artificial Sequence
  Synthetic Oligonucleotide
ggugauuugaagcaauaugauagug

SEQ ID NO: 12453 - RNA, 25 nt, Artificial Sequence
  Synthetic Oligonucleotide
agugauuuaaaacaauaugacagug

SEQ ID NO: 12454 - RNA, 25 nt, Artificial Sequence
  Synthetic Oligonucleotide
aagcgauuugaagcaauaugauagc

SEQ ID NO: 12455 - RNA, 25 nt, Artificial Sequence
  Synthetic Oligonucleotide
aagcgauuugaagcaauaugauaau

SEQ ID NO: 12456 - RNA, 25 nt, Artificial Sequence
  Synthetic Oligonucleotide
aagcgauuugaagcaauaugacagu

SEQ ID NO: 12457 - RNA, 25 nt, Artificial Sequence
  Synthetic Oligonucleotide
aagcgauuugaagcaauaugacagc

SEQ ID NO: 12458 - RNA, 25 nt, Artificial Sequence
  Synthetic Oligonucleotide
aagcgauuugaagcaauauaauagu

SEQ ID NO: 12459 - RNA, 25 nt, Artificial Sequence
  Synthetic Oligonucleotide
aagcgauuugaagcaauauuauagu

SEQ ID NO: 12460 - RNA, 25 nt, Artificial Sequence
  Synthetic Oligonucleotide
aagcgauuugaagcaauacgauagu

SEQ ID NO: 12461 - RNA, 25 nt, Artificial Sequence
  Synthetic Oligonucleotide
aagcgauuugaagcaguaugauagu

SEQ ID NO: 12462 - RNA, 25 nt, Artificial Sequence
  Synthetic Oligonucleotide
aagcgauuugaaacaauaugauagu

SEQ ID NO: 12463 - RNA, 25 nt, Artificial Sequence
  Synthetic Oligonucleotide
aagcgauuugaggcaauaugauagu

SEQ ID NO: 12464 - RNA, 25 nt, Artificial Sequence
  Synthetic Oligonucleotide
aagcgauuuaaagcaauaugauagu

SEQ ID NO: 12465 - RNA, 25 nt, Artificial Sequence
  Synthetic Oligonucleotide
aagcgaucugaagcaauaugauagu

SEQ ID NO: 12466 - RNA, 25 nt, Artificial Sequence
  Synthetic Oligonucleotide
aagcgacuugaagcaauaugauagu

SEQ ID NO: 12467 - RNA, 25 nt, Artificial Sequence
  Synthetic Oligonucleotide
aagcgacuugaagcaauauuauagu

SEQ ID NO: 12468 - RNA, 25 nt, Artificial Sequence
  Synthetic Oligonucleotide
aagugauuugaagcaauaugauagu

SEQ ID NO: 12469 - RNA, 25 nt, Artificial Sequence
  Synthetic Oligonucleotide
aaacgauuugaagcaauaugauagu

SEQ ID NO: 12470 - RNA, 25 nt, Artificial Sequence
  Synthetic Oligonucleotide
aaucgauuugaagcaauaugauagu

SEQ ID NO: 12471 - RNA, 25 nt, Artificial Sequence
  Synthetic Oligonucleotide
aggcgauuugaagcaauaugauagu

SEQ ID NO: 12472 - RNA, 25 nt, Artificial Sequence
  Synthetic Oligonucleotide
gagcgauuugaagcaauaugauagu

SEQ ID NO: 12473 - RNA, 25 nt, Artificial Sequence
  Synthetic Oligonucleotide
uagcgauuugaagcaauaugauagu

SEQ ID NO: 12474 - RNA, 25 nt, Artificial Sequence
  Synthetic Oligonucleotide
aggcgacuugaagcaauaugauagu

SEQ ID NO: 12475 - RNA, 25 nt, Artificial Sequence
  Synthetic Oligonucleotide
aggugauuugaagcaauaugauagu

SEQ ID NO: 12476 - RNA, 25 nt, Artificial Sequence
  Synthetic Oligonucleotide
cagcgauuuaaagcaauaugauagu

SEQ ID NO: 12477 - RNA, 25 nt, Artificial Sequence
  Synthetic Oligonucleotide
agaggcgaagaaacaauugaagaga

SEQ ID NO: 12478 - RNA, 25 nt, Artificial Sequence
  Synthetic Oligonucleotide
agaggcgaagaaacaauugaggaaa

SEQ ID NO: 12479 - RNA, 25 nt, Artificial Sequence
  Synthetic Oligonucleotide
agaggcgaagaaacaaucgaagaaa

SEQ ID NO: 12480 - RNA, 25 nt, Artificial Sequence
  Synthetic Oligonucleotide
agaggcgaagaaacaacugaagaaa

SEQ ID NO: 12481 - RNA, 25 nt, Artificial Sequence
  Synthetic Oligonucleotide
agaggcgaagaaacwauugaagaaa

SEQ ID NO: 12482 - RNA, 25 nt, Artificial Sequence
  Synthetic Oligonucleotide
agaggcgaagagacaauugaagaaa

SEQ ID NO: 12483 - RNA, 25 nt, Artificial Sequence
  Synthetic Oligonucleotide
agaggcgaaaaaacaauugaagaaa

SEQ ID NO: 12484 - RNA, 25 nt, Artificial Sequence
  Synthetic Oligonucleotide
agaggcgaggaaacaauugaagaaa

SEQ ID NO: 12485 - RNA, 25 nt, Artificial Sequence
  Synthetic Oligonucleotide
agaggcgaagagacaaucgaagaaa

SEQ ID NO: 12486 - RNA, 25 nt, Artificial Sequence
  Synthetic Oligonucleotide
agaggcgaggagacaauugaagaaa

SEQ ID NO: 12487 - RNA, 25 nt, Artificial Sequence
  Synthetic Oligonucleotide
agaggagaagagacaauugaagaaa

SEQ ID NO: 12488 - RNA, 25 nt, Artificial Sequence
  Synthetic Oligonucleotide
agaggcgaggagacaaucgaagaaa

SEQ ID NO: 12489 - RNA, 25 nt, Artificial Sequence
  Synthetic Oligonucleotide
gagggcaagcuuucucaaaugucaa

SEQ ID NO: 12490 - RNA, 25 nt, Artificial Sequence
  Synthetic Oligonucleotide
gagggcaagcuuucucaaaugucga

SEQ ID NO: 12491 - RNA, 25 nt, Artificial Sequence
  Synthetic Oligonucleotide
gagggcaagcuuucucaaauguaca

SEQ ID NO: 12492 - RNA, 25 nt, Artificial Sequence
  Synthetic Oligonucleotide
gagggcaagcuuucucaaauguuca

SEQ ID NO: 12493 - RNA, 25 nt, Artificial Sequence
  Synthetic Oligonucleotide
gagggcaagcuuucucagaugucca

SEQ ID NO: 12494 - RNA, 25 nt, Artificial Sequence
  Synthetic Oligonucleotide
gagggcaagcuuucacaaaugucca

SEQ ID NO: 12495 - RNA, 25 nt, Artificial Sequence
  Synthetic Oligonucleotide
gagggcaagcuuccucaaaugucca

SEQ ID NO: 12496 - RNA, 25 nt, Artificial Sequence
  Synthetic Oligonucleotide
gagggcaagcugucucaaaugucca

SEQ ID NO: 12497 - RNA, 25 nt, Artificial Sequence
  Synthetic Oligonucleotide
gagggcaagcugucucaaaugucaa

SEQ ID NO: 12498 - RNA, 25 nt, Artificial Sequence
  Synthetic Oligonucleotide
gagggcaaacuuucucaaaugucca

SEQ ID NO: 12499 - RNA, 25 nt, Artificial Sequence
  Synthetic Oligonucleotide
gaggguaagcuuucucaaaugucca

SEQ ID NO: 12500 - RNA, 25 nt, Artificial Sequence
  Synthetic Oligonucleotide
gaaggcaagcuuucucaaaugucca

SEQ ID NO: 12501 - RNA, 25 nt, Artificial Sequence
  Synthetic Oligonucleotide
gaggguaagcuuucacaaaugucca

SEQ ID NO: 12502 - RNA, 25 nt, Artificial Sequence
  Synthetic Oligonucleotide
agggcaagcuuucucaaaugucaaa

SEQ ID NO: 12503 - RNA, 25 nt, Artificial Sequence
  Synthetic Oligonucleotide
agggcaagcuuucucaaaugucgaa

SEQ ID NO: 12504 - RNA, 25 nt, Artificial Sequence
  Synthetic Oligonucleotide
agggcaagcuuucucaaauguacaa

SEQ ID NO: 12505 - RNA, 25 nt, Artificial Sequence
  Synthetic Oligonucleotide
agggcaagcuuucucaaauguucaa

SEQ ID NO: 12506 - RNA, 25 nt, Artificial Sequence
  Synthetic Oligonucleotide
agggcaagcuuucucagauguccaa

SEQ ID NO: 12507 - RNA, 25 nt, Artificial Sequence
  Synthetic Oligonucleotide
agggcaagcuuucacaaauguccaa

SEQ ID NO: 12508 - RNA, 25 nt, Artificial Sequence
  Synthetic Oligonucleotide
agggcaagcuuccucaaauguccaa

SEQ ID NO: 12509 - RNA, 25 nt, Artificial Sequence
  Synthetic Oligonucleotide
agggcaagcugucucaaauguccaa

SEQ ID NO: 12510 - RNA, 25 nt, Artificial Sequence
  Synthetic Oligonucleotide
agggcaagcugucucaaaugucaaa

SEQ ID NO: 12511 - RNA, 25 nt, Artificial Sequence
  Synthetic Oligonucleotide
agggcaaacuuucucaaauguccaa

SEQ ID NO: 12512 - RNA, 25 nt, Artificial Sequence
  Synthetic Oligonucleotide
aggguaagcuuucucaaauguccaa

SEQ ID NO: 12513 - RNA, 25 nt, Artificial Sequence
  Synthetic Oligonucleotide
aaggcaagcuuucucaaauguccaa

SEQ ID NO: 12514 - RNA, 25 nt, Artificial Sequence
  Synthetic Oligonucleotide
aggguaagcuuucacaaauguccaa

SEQ ID NO: 12515 - RNA, 25 nt, Artificial Sequence
  Synthetic Oligonucleotide
ugagggcaagcuuucucaaauguca

SEQ ID NO: 12516 - RNA, 25 nt, Artificial Sequence
  Synthetic Oligonucleotide
ugagggcaagcuuucucaaaugucg

SEQ ID NO: 12517 - RNA, 25 nt, Artificial Sequence
  Synthetic Oligonucleotide
ugagggcaagcuuucucaaauguac

SEQ ID NO: 12518 - RNA, 25 nt, Artificial Sequence
  Synthetic Oligonucleotide
ugagggcaagcuuucucaaauguuc

SEQ ID NO: 12519 - RNA, 25 nt, Artificial Sequence
  Synthetic Oligonucleotide
ugagggcaagcuuucucagaugucc

SEQ ID NO: 12520 - RNA, 25 nt, Artificial Sequence
  Synthetic Oligonucleotide
ugagggcaagcuuucacaaaugucc

SEQ ID NO: 12521 - RNA, 25 nt, Artificial Sequence
  Synthetic Oligonucleotide
ugagggcaagcuuccucaaaugucc

SEQ ID NO: 12522 - RNA, 25 nt, Artificial Sequence
  Synthetic Oligonucleotide
ugagggcaagcugucucaaaugucc

SEQ ID NO: 12523 - RNA, 25 nt, Artificial Sequence
  Synthetic Oligonucleotide
ugagggcaagcugucucaaauguca

SEQ ID NO: 12524 - RNA, 25 nt, Artificial Sequence
  Synthetic Oligonucleotide
ugagggcaaacuuucucaaaugucc

SEQ ID NO: 12525 - RNA, 25 nt, Artificial Sequence
  Synthetic Oligonucleotide
ugaggguaagcuuucucaaaugucc

SEQ ID NO: 12526 - RNA, 25 nt, Artificial Sequence
  Synthetic Oligonucleotide
ugaaggcaagcuuucucaaaugucc

SEQ ID NO: 12527 - RNA, 25 nt, Artificial Sequence
  Synthetic Oligonucleotide
agagggcaagcuuucucaaaugucc

SEQ ID NO: 12528 - RNA, 25 nt, Artificial Sequence
  Synthetic Oligonucleotide
ugaggguaagcuuucacaaaugucc

SEQ ID NO: 12529 - RNA, 25 nt, Artificial Sequence
  Synthetic Oligonucleotide
gggcaagcuuucucaaauguccaag

SEQ ID NO: 12530 - RNA, 25 nt, Artificial Sequence
  Synthetic Oligonucleotide
gggcaagcuuucucaaaugucaaaa

SEQ ID NO: 12531 - RNA, 25 nt, Artificial Sequence
  Synthetic Oligonucleotide
gggcaagcuuucucaaaugucgaaa

SEQ ID NO: 12532 - RNA, 25 nt, Artificial Sequence
  Synthetic Oligonucleotide
gggcaagcuuucucaaauguacaaa

SEQ ID NO: 12533 - RNA, 25 nt, Artificial Sequence
  Synthetic Oligonucleotide
gggcaagcuuucucaaauguucaaa

SEQ ID NO: 12534 - RNA, 25 nt, Artificial Sequence
  Synthetic Oligonucleotide
gggcaagcuuucucagauguccaaa

SEQ ID NO: 12535 - RNA, 25 nt, Artificial Sequence
  Synthetic Oligonucleotide
gggcaagcuuucacaaauguccaaa

SEQ ID NO: 12536 - RNA, 25 nt, Artificial Sequence
  Synthetic Oligonucleotide
gggcaagcuuccucaaauguccaaa

SEQ ID NO: 12537 - RNA, 25 nt, Artificial Sequence
  Synthetic Oligonucleotide
gggcaagcugucucaaauguccaaa

SEQ ID NO: 12538 - RNA, 25 nt, Artificial Sequence
  Synthetic Oligonucleotide
gggcaagcugucucaaaugucaaaa

SEQ ID NO: 12539 - RNA, 25 nt, Artificial Sequence
  Synthetic Oligonucleotide
gggcaaacuuucucaaauguccaaa

SEQ ID NO: 12540 - RNA, 25 nt, Artificial Sequence
  Synthetic Oligonucleotide
ggguaagcuuucucaaauguccaaa

SEQ ID NO: 12541 - RNA, 25 nt, Artificial Sequence
  Synthetic Oligonucleotide
aggcaagcuuucucaaauguccaaa

SEQ ID NO: 12542 - RNA, 25 nt, Artificial Sequence
  Synthetic Oligonucleotide
ggguaagcuuucacaaauguccaaa

SEQ ID NO: 12543 - RNA, 25 nt, Artificial Sequence
  Synthetic Oligonucleotide
auaagcgauuugaagcaauaugaca

SEQ ID NO: 12544 - RNA, 25 nt, Artificial Sequence
  Synthetic Oligonucleotide
auaagcgauuugaagcaauauaaua

SEQ ID NO: 12545 - RNA, 25 nt, Artificial Sequence
  Synthetic Oligonucleotide
auaagcgauuugaagcaauacgaua

SEQ ID NO: 12546 - RNA, 25 nt, Artificial Sequence
  Synthetic Oligonucleotide
auaagcgauuugaagcaguaugaua

SEQ ID NO: 12547 - RNA, 25 nt, Artificial Sequence
  Synthetic Oligonucleotide
auaagcgauuugaaacaauaugaua

SEQ ID NO: 12548 - RNA, 25 nt, Artificial Sequence
  Synthetic Oligonucleotide
auaagcgauuugaggcaauaugaua

SEQ ID NO: 12549 - RNA, 25 nt, Artificial Sequence
  Synthetic Oligonucleotide
auaagcgauuuaaagcaauaugaua

SEQ ID NO: 12550 - RNA, 25 nt, Artificial Sequence
  Synthetic Oligonucleotide
auaagcgacuugaagcaauaugaua

SEQ ID NO: 12551 - RNA, 25 nt, Artificial Sequence
  Synthetic Oligonucleotide
auaagugauuugaagcaauaugaua

SEQ ID NO: 12552 - RNA, 25 nt, Artificial Sequence
  Synthetic Oligonucleotide
auaaacgauuugaagcaauaugaua

SEQ ID NO: 12553 - RNA, 25 nt, Artificial Sequence
  Synthetic Oligonucleotide
auaaucgauuugaagcaauaugaua

SEQ ID NO: 12554 - RNA, 25 nt, Artificial Sequence
  Synthetic Oligonucleotide
auaggcgauuugaagcaauaugaua

SEQ ID NO: 12555 - RNA, 25 nt, Artificial Sequence
  Synthetic Oligonucleotide
augagcgauuugaagcaauaugaua

SEQ ID NO: 12556 - RNA, 25 nt, Artificial Sequence
  Synthetic Oligonucleotide
auuagcgauuugaagcaauaugaua

SEQ ID NO: 12557 - RNA, 25 nt, Artificial Sequence
  Synthetic Oligonucleotide
acaagcgauuugaagcaauaugaua

SEQ ID NO: 12558 - RNA, 25 nt, Artificial Sequence
  Synthetic Oligonucleotide
guaagcgauuugaagcaauaugaua

SEQ ID NO: 12559 - RNA, 25 nt, Artificial Sequence
  Synthetic Oligonucleotide
guaagcgauuugaagcaauauuaua

SEQ ID NO: 12560 - RNA, 25 nt, Artificial Sequence
  Synthetic Oligonucleotide
auaggcgacuugaagcaauaugaua

SEQ ID NO: 12561 - RNA, 25 nt, Artificial Sequence
  Synthetic Oligonucleotide
aucagcgauuuaaagcaauaugaua

SEQ ID NO: 12562 - RNA, 25 nt, Artificial Sequence
  Synthetic Oligonucleotide
guaagcgaucugaagcaauaugaua

SEQ ID NO: 12563 - RNA, 25 nt, Artificial Sequence
  Synthetic Oligonucleotide
guaagcgacuugaagcaauauuaua

SEQ ID NO: 12564 - RNA, 25 nt, Artificial Sequence
  Synthetic Oligonucleotide
guaggcgauuugaagcaauaugaua

SEQ ID NO: 12565 - RNA, 25 nt, Artificial Sequence
  Synthetic Oligonucleotide
guaggugauuugaagcaauaugaua

SEQ ID NO: 12566 - RNA, 25 nt, Artificial Sequence
  Synthetic Oligonucleotide
uaaugaaggggguauacauuaacac

SEQ ID NO: 12567 - RNA, 25 nt, Artificial Sequence
  Synthetic Oligonucleotide
uaaugaaggggguauacaucaauac

SEQ ID NO: 12568 - RNA, 25 nt, Artificial Sequence
  Synthetic Oligonucleotide
uaaugaaggggguauacaucaacac

SEQ ID NO: 12569 - RNA, 25 nt, Artificial Sequence
  Synthetic Oligonucleotide
uaaugaaggggguauacguuaauac

SEQ ID NO: 12570 - RNA, 25 nt, Artificial Sequence
  Synthetic Oligonucleotide
uaaugaaggggguauauauuaauac

SEQ ID NO: 12571 - RNA, 25 nt, Artificial Sequence
  Synthetic Oligonucleotide
uaaugaaggggguacacauuaauac

SEQ ID NO: 12572 - RNA, 25 nt, Artificial Sequence
  Synthetic Oligonucleotide
uaaugaaggggguguacauuaauac

SEQ ID NO: 12573 - RNA, 25 nt, Artificial Sequence
  Synthetic Oligonucleotide
uaaugaaggggguguacauaaacac

SEQ ID NO: 12574 - RNA, 25 nt, Artificial Sequence
  Synthetic Oligonucleotide
uaaugaaggggguguacaucaauac

SEQ ID NO: 12575 - RNA, 25 nt, Artificial Sequence
  Synthetic Oligonucleotide
uaaugaaggggguuuacauuaauac

SEQ ID NO: 12576 - RNA, 25 nt, Artificial Sequence
  Synthetic Oligonucleotide
uaaugaaggggguuuacauaaauac

SEQ ID NO: 12577 - RNA, 25 nt, Artificial Sequence
  Synthetic Oligonucleotide
uaaugaaggggguuuacauaaacac

SEQ ID NO: 12578 - RNA, 25 nt, Artificial Sequence
  Synthetic Oligonucleotide
uaaugaaggggguuuacauaaacau

SEQ ID NO: 12579 - RNA, 25 nt, Artificial Sequence
  Synthetic Oligonucleotide
uaaugaaggggauauacauuaauac

SEQ ID NO: 12580 - RNA, 25 nt, Artificial Sequence
  Synthetic Oligonucleotide
uaaugaagggaguauacauuaauac

SEQ ID NO: 12581 - RNA, 25 nt, Artificial Sequence
  Synthetic Oligonucleotide
uaaugaagggaguauacauaaacac

SEQ ID NO: 12582 - RNA, 25 nt, Artificial Sequence
  Synthetic Oligonucleotide
uaaugaaagggguauacauuaauac

SEQ ID NO: 12583 - RNA, 25 nt, Artificial Sequence
  Synthetic Oligonucleotide
uaauaaaggggguauacauuaauac

SEQ ID NO: 12584 - RNA, 25 nt, Artificial Sequence
  Synthetic Oligonucleotide
uagugaaggggguauacauuaauac

SEQ ID NO: 12585 - RNA, 25 nt, Artificial Sequence
  Synthetic Oligonucleotide
uaaugaagggagucuacauaaauac

SEQ ID NO: 12586 - RNA, 25 nt, Artificial Sequence
  Synthetic Oligonucleotide
uaaugaagggaguguacauaaauac

SEQ ID NO: 12587 - RNA, 25 nt, Artificial Sequence
  Synthetic Oligonucleotide
uaaugaagggaguguacauaaacac

SEQ ID NO: 12588 - RNA, 25 nt, Artificial Sequence
  Synthetic Oligonucleotide
uaaugaagggaguguacaucaauac

SEQ ID NO: 12589 - RNA, 25 nt, Artificial Sequence
  Synthetic Oligonucleotide
uaaugaagggaauauacauuaauac

SEQ ID NO: 12590 - RNA, 25 nt, Artificial Sequence
  Synthetic Oligonucleotide
uaaugaagggaguguaccuaaacac

SEQ ID NO: 12591 - RNA, 25 nt, Artificial Sequence
  Synthetic Oligonucleotide
uaaugaagggaguguauauaaauac

SEQ ID NO: 12592 - RNA, 25 nt, Artificial Sequence
  Synthetic Oligonucleotide
uaaugaggggaguguacauaaacac

SEQ ID NO: 12593 - RNA, 25 nt, Artificial Sequence
  Synthetic Oligonucleotide
auaaugaaggggguauacauuaaca

SEQ ID NO: 12594 - RNA, 25 nt, Artificial Sequence
  Synthetic Oligonucleotide
auaaugaaggggguauacaucaaua

SEQ ID NO: 12595 - RNA, 25 nt, Artificial Sequence
  Synthetic Oligonucleotide
auaaugaaggggguauacaucaaca

SEQ ID NO: 12596 - RNA, 25 nt, Artificial Sequence
  Synthetic Oligonucleotide
auaaugaaggggguauacguuaaua

SEQ ID NO: 12597 - RNA, 25 nt, Artificial Sequence
  Synthetic Oligonucleotide
auaaugaaggggguauauauuaaua

SEQ ID NO: 12598 - RNA, 25 nt, Artificial Sequence
  Synthetic Oligonucleotide
auaaugaaggggguacacauuaaua

SEQ ID NO: 12599 - RNA, 25 nt, Artificial Sequence
  Synthetic Oligonucleotide
auaaugaaggggguguacauuaaua

SEQ ID NO: 12600 - RNA, 25 nt, Artificial Sequence
  Synthetic Oligonucleotide
auaaugaaggggguguacauaaaca

SEQ ID NO: 12601 - RNA, 25 nt, Artificial Sequence
  Synthetic Oligonucleotide
auaaugaaggggguguacaucaaua

SEQ ID NO: 12602 - RNA, 25 nt, Artificial Sequence
  Synthetic Oligonucleotide
auaaugaaggggguuuacauuaaua

SEQ ID NO: 12603 - RNA, 25 nt, Artificial Sequence
  Synthetic Oligonucleotide
auaaugaaggggguuuacauaaaua

SEQ ID NO: 12604 - RNA, 25 nt, Artificial Sequence
  Synthetic Oligonucleotide
auaaugaaggggguuuacauaaaca

SEQ ID NO: 12605 - RNA, 25 nt, Artificial Sequence
  Synthetic Oligonucleotide
auaaugaaggggauauacauuaaua

SEQ ID NO: 12606 - RNA, 25 nt, Artificial Sequence
  Synthetic Oligonucleotide
auaaugaagggaguauacauuaaua

SEQ ID NO: 12607 - RNA, 25 nt, Artificial Sequence
  Synthetic Oligonucleotide
auaaugaagggaguauacauaaaca

SEQ ID NO: 12608 - RNA, 25 nt, Artificial Sequence
  Synthetic Oligonucleotide
auaaugaaagggguauacauuaaua

SEQ ID NO: 12609 - RNA, 25 nt, Artificial Sequence
  Synthetic Oligonucleotide
auaauaaaggggguauacauuaaua

SEQ ID NO: 12610 - RNA, 25 nt, Artificial Sequence
  Synthetic Oligonucleotide
auagugaaggggguauacauuaaua

SEQ ID NO: 12611 - RNA, 25 nt, Artificial Sequence
  Synthetic Oligonucleotide
uuaaugaaggggguauacauuaaua

SEQ ID NO: 12612 - RNA, 25 nt, Artificial Sequence
  Synthetic Oligonucleotide
auaaugaagggagucuacauaaaua

SEQ ID NO: 12613 - RNA, 25 nt, Artificial Sequence
  Synthetic Oligonucleotide
auaaugaagggaguguacauaaaua

SEQ ID NO: 12614 - RNA, 25 nt, Artificial Sequence
  Synthetic Oligonucleotide
auaaugaagggaguguacauaaaca

SEQ ID NO: 12615 - RNA, 25 nt, Artificial Sequence
  Synthetic Oligonucleotide
auaaugaagggaguguacaucaaua

SEQ ID NO: 12616 - RNA, 25 nt, Artificial Sequence
  Synthetic Oligonucleotide
auaaugaagggaauauacauuaaua

SEQ ID NO: 12617 - RNA, 25 nt, Artificial Sequence
  Synthetic Oligonucleotide
auaaugaagggaguguaccuaaaca

SEQ ID NO: 12618 - RNA, 25 nt, Artificial Sequence
  Synthetic Oligonucleotide
auaaugaagggaguguauauaaaua

SEQ ID NO: 12619 - RNA, 25 nt, Artificial Sequence
  Synthetic Oligonucleotide
auaaugaggggaguguacauaaaca

SEQ ID NO: 12620 - RNA, 25 nt, Artificial Sequence
  Synthetic Oligonucleotide
ggggcuauaugaagcaauugaggaa

SEQ ID NO: 12621 - RNA, 25 nt, Artificial Sequence
  Synthetic Oligonucleotide
ggggcuauaugaagcaaucgaggag

SEQ ID NO: 12622 - RNA, 25 nt, Artificial Sequence
  Synthetic Oligonucleotide
ggggcuauaugaagcaguugaggag

SEQ ID NO: 12623 - RNA, 25 nt, Artificial Sequence
  Synthetic Oligonucleotide
ggggcuauaugaagcaguugaggaa

SEQ ID NO: 12624 - RNA, 25 nt, Artificial Sequence
  Synthetic Oligonucleotide
ggggcuauaugaggcaauugaggag

SEQ ID NO: 12625 - RNA, 25 nt, Artificial Sequence
  Synthetic Oligonucleotide
ggggcuauauggagcaauugaggag

SEQ ID NO: 12626 - RNA, 25 nt, Artificial Sequence
  Synthetic Oligonucleotide
ggggcuguaugaagcaauugaggag

SEQ ID NO: 12627 - RNA, 25 nt, Artificial Sequence
  Synthetic Oligonucleotide
gggguuauaugaagcaauugaggag

SEQ ID NO: 12628 - RNA, 25 nt, Artificial Sequence
  Synthetic Oligonucleotide
gggacuauaugaagcaauugaggag

SEQ ID NO: 12629 - RNA, 25 nt, Artificial Sequence
  Synthetic Oligonucleotide
agggcuauaugaagcaauugaggag

SEQ ID NO: 12630 - RNA, 25 nt, Artificial Sequence
  Synthetic Oligonucleotide
wgggcuauaugaagcaauugaggag

SEQ ID NO: 12631 - RNA, 25 nt, Artificial Sequence
  Synthetic Oligonucleotide
gggauuauaugaagcaauugaggag

SEQ ID NO: 12632 - RNA, 25 nt, Artificial Sequence
  Synthetic Oligonucleotide
agggcuauaugaagcgauugaggag

SEQ ID NO: 12633 - RNA, 25 nt, Artificial Sequence
  Synthetic Oligonucleotide
agggcuauaugaugcaauugaggag

SEQ ID NO: 12634 - RNA, 25 nt, Artificial Sequence
  Synthetic Oligonucleotide
agggcuauauggagcaauugaggag

SEQ ID NO: 12635 - RNA, 25 nt, Artificial Sequence
  Synthetic Oligonucleotide
agggcuauacgaagcaauugaggag

SEQ ID NO: 12636 - RNA, 25 nt, Artificial Sequence
  Synthetic Oligonucleotide
agggcuguaugaagcaauugaggag

SEQ ID NO: 12637 - RNA, 25 nt, Artificial Sequence
  Synthetic Oligonucleotide
aggacuauaugaagcaauugaggag

SEQ ID NO: 12638 - RNA, 25 nt, Artificial Sequence
  Synthetic Oligonucleotide
uggacuauaugaagcaauugaggag

SEQ ID NO: 12639 - RNA, 25 nt, Artificial Sequence
  Synthetic Oligonucleotide
gauuugaagcaauaugauagugaag

SEQ ID NO: 12640 - RNA, 25 nt, Artificial Sequence
  Synthetic Oligonucleotide
gauuugaagcaauaugauagugaug

SEQ ID NO: 12641 - RNA, 25 nt, Artificial Sequence
  Synthetic Oligonucleotide
gauuugaagcaauaugauaguaacg

SEQ ID NO: 12642 - RNA, 25 nt, Artificial Sequence
  Synthetic Oligonucleotide
gauuugaagcaauaugauagcgacg

SEQ ID NO: 12643 - RNA, 25 nt, Artificial Sequence
  Synthetic Oligonucleotide
gauuugaagcaauaugauaaugacg

SEQ ID NO: 12644 - RNA, 25 nt, Artificial Sequence
  Synthetic Oligonucleotide
gauuugaagcaauaugacagugacg

SEQ ID NO: 12645 - RNA, 25 nt, Artificial Sequence
  Synthetic Oligonucleotide
gauuugaagcaauaugacagcgacg

SEQ ID NO: 12646 - RNA, 25 nt, Artificial Sequence
  Synthetic Oligonucleotide
gauuugaagcaauauaauagugacg

SEQ ID NO: 12647 - RNA, 25 nt, Artificial Sequence
  Synthetic Oligonucleotide
gauuugaagcaauauuauagugaug

SEQ ID NO: 12648 - RNA, 25 nt, Artificial Sequence
  Synthetic Oligonucleotide
gauuugaagcaauacgauagugacg

SEQ ID NO: 12649 - RNA, 25 nt, Artificial Sequence
  Synthetic Oligonucleotide
gauuugaagcaguaugauagugacg

SEQ ID NO: 12650 - RNA, 25 nt, Artificial Sequence
  Synthetic Oligonucleotide
gauuugaaacaauaugauagugacg

SEQ ID NO: 12651 - RNA, 25 nt, Artificial Sequence
  Synthetic Oligonucleotide
gauuugaggcaauaugauagugacg

SEQ ID NO: 12652 - RNA, 25 nt, Artificial Sequence
  Synthetic Oligonucleotide
gauuuaaagcaauaugauagugacg

SEQ ID NO: 12653 - RNA, 25 nt, Artificial Sequence
  Synthetic Oligonucleotide
gaucugaagcaauaugauagugacg

SEQ ID NO: 12654 - RNA, 25 nt, Artificial Sequence
  Synthetic Oligonucleotide
gaucugaagcaauaugauagugaug

SEQ ID NO: 12655 - RNA, 25 nt, Artificial Sequence
  Synthetic Oligonucleotide
gacuugaagcaauaugauagugacg

SEQ ID NO: 12656 - RNA, 25 nt, Artificial Sequence
  Synthetic Oligonucleotide
gacuugaagcaauaugauagugaug

SEQ ID NO: 12657 - RNA, 25 nt, Artificial Sequence
  Synthetic Oligonucleotide
gacuugaagcaauauuauagugaug

SEQ ID NO: 12658 - RNA, 25 nt, Artificial Sequence
  Synthetic Oligonucleotide
gauuuaaagcaguaugacagugaug

SEQ ID NO: 12659 - RNA, 25 nt, Artificial Sequence
  Synthetic Oligonucleotide
gauuuaaaacaauaugacagugaug

SEQ ID NO: 12660 - RNA, 25 nt, Artificial Sequence
  Synthetic Oligonucleotide
auuugaagcaauaugauagugaaga

SEQ ID NO: 12661 - RNA, 25 nt, Artificial Sequence
  Synthetic Oligonucleotide
auuugaagcaauaugauagugauga

SEQ ID NO: 12662 - RNA, 25 nt, Artificial Sequence
  Synthetic Oligonucleotide
auuugaagcaauaugauagugaugg

SEQ ID NO: 12663 - RNA, 25 nt, Artificial Sequence
  Synthetic Oligonucleotide
auuugaagcaauaugauaguaacga

SEQ ID NO: 12664 - RNA, 25 nt, Artificial Sequence
  Synthetic Oligonucleotide
auuugaagcaauaugauagcgacga

SEQ ID NO: 12665 - RNA, 25 nt, Artificial Sequence
  Synthetic Oligonucleotide
auuugaagcaauaugauaaugacga

SEQ ID NO: 12666 - RNA, 25 nt, Artificial Sequence
  Synthetic Oligonucleotide
auuugaagcaauaugacagugacga

SEQ ID NO: 12667 - RNA, 25 nt, Artificial Sequence
  Synthetic Oligonucleotide
auuugaagcaauaugacagcgacga

SEQ ID NO: 12668 - RNA, 25 nt, Artificial Sequence
  Synthetic Oligonucleotide
auuugaagcaauauaauagugacga

SEQ ID NO: 12669 - RNA, 25 nt, Artificial Sequence
  Synthetic Oligonucleotide
auuugaagcaauauuauagugauga

SEQ ID NO: 12670 - RNA, 25 nt, Artificial Sequence
  Synthetic Oligonucleotide
auuugaagcaauacgauagugacga

SEQ ID NO: 12671 - RNA, 25 nt, Artificial Sequence
  Synthetic Oligonucleotide
auuugaagcaguaugauagugacga

SEQ ID NO: 12672 - RNA, 25 nt, Artificial Sequence
  Synthetic Oligonucleotide
auuugaaacaauaugauagugacga

SEQ ID NO: 12673 - RNA, 25 nt, Artificial Sequence
  Synthetic Oligonucleotide
auuugaggcaauaugauagugacga

SEQ ID NO: 12674 - RNA, 25 nt, Artificial Sequence
  Synthetic Oligonucleotide
auuuaaagcaauaugauagugacga

SEQ ID NO: 12675 - RNA, 25 nt, Artificial Sequence
  Synthetic Oligonucleotide
auuuaaagcaauaugauagugacgg

SEQ ID NO: 12676 - RNA, 25 nt, Artificial Sequence
  Synthetic Oligonucleotide
aucugaagcaauaugauagugacga

SEQ ID NO: 12677 - RNA, 25 nt, Artificial Sequence
  Synthetic Oligonucleotide
aucugaagcaauaugauagugauga

SEQ ID NO: 12678 - RNA, 25 nt, Artificial Sequence
  Synthetic Oligonucleotide
acuugaagcaauaugauagugacga

SEQ ID NO: 12679 - RNA, 25 nt, Artificial Sequence
  Synthetic Oligonucleotide
acuugaagcaauaugauagugauga

SEQ ID NO: 12680 - RNA, 25 nt, Artificial Sequence
  Synthetic Oligonucleotide
acuugaagcaauauuauagugauga

SEQ ID NO: 12681 - RNA, 25 nt, Artificial Sequence
  Synthetic Oligonucleotide
auuuaaagcaguaugacagugauga

SEQ ID NO: 12682 - RNA, 25 nt, Artificial Sequence
  Synthetic Oligonucleotide
auuuaaaacaauaugacagugauga

SEQ ID NO: 12683 - RNA, 25 nt, Artificial Sequence
  Synthetic Oligonucleotide
cgauuugaagcaauaugauagugaa

SEQ ID NO: 12684 - RNA, 25 nt, Artificial Sequence
  Synthetic Oligonucleotide
cgauuugaagcaauaugauagugau

SEQ ID NO: 12685 - RNA, 25 nt, Artificial Sequence
  Synthetic Oligonucleotide
cgauuugaagcaauaugauaguaac

SEQ ID NO: 12686 - RNA, 25 nt, Artificial Sequence
  Synthetic Oligonucleotide
cgauuugaagcaauaugauagcgac

SEQ ID NO: 12687 - RNA, 25 nt, Artificial Sequence
  Synthetic Oligonucleotide
cgauuugaagcaauaugauaaugac

SEQ ID NO: 12688 - RNA, 25 nt, Artificial Sequence
  Synthetic Oligonucleotide
cgauuugaagcaauaugacagugac

SEQ ID NO: 12689 - RNA, 25 nt, Artificial Sequence
  Synthetic Oligonucleotide
cgauuugaagcaauaugacagcgac

SEQ ID NO: 12690 - RNA, 25 nt, Artificial Sequence
  Synthetic Oligonucleotide
cgauuugaagcaauauaauagugac

SEQ ID NO: 12691 - RNA, 25 nt, Artificial Sequence
  Synthetic Oligonucleotide
cgauuugaagcaauauuauagugau

SEQ ID NO: 12692 - RNA, 25 nt, Artificial Sequence
  Synthetic Oligonucleotide
cgauuugaagcaauacgauagugac

SEQ ID NO: 12693 - RNA, 25 nt, Artificial Sequence
  Synthetic Oligonucleotide
cgauuugaagcaguaugauagugac

SEQ ID NO: 12694 - RNA, 25 nt, Artificial Sequence
  Synthetic Oligonucleotide
cgauuugaaacaauaugauagugac

SEQ ID NO: 12695 - RNA, 25 nt, Artificial Sequence
  Synthetic Oligonucleotide
cgauuugaggcaauaugauagugac

SEQ ID NO: 12696 - RNA, 25 nt, Artificial Sequence
  Synthetic Oligonucleotide
cgauuuaaagcaauaugauagugac

SEQ ID NO: 12697 - RNA, 25 nt, Artificial Sequence
  Synthetic Oligonucleotide
cgaucugaagcaauaugauagugac

SEQ ID NO: 12698 - RNA, 25 nt, Artificial Sequence
  Synthetic Oligonucleotide
cgaucugaagcaauaugauagugau

SEQ ID NO: 12699 - RNA, 25 nt, Artificial Sequence
  Synthetic Oligonucleotide
cgacuugaagcaauaugauagugac

SEQ ID NO: 12700 - RNA, 25 nt, Artificial Sequence
  Synthetic Oligonucleotide
cgacuugaagcaauaugauagugau

SEQ ID NO: 12701 - RNA, 25 nt, Artificial Sequence
  Synthetic Oligonucleotide
ugauuugaagcaauaugauagugac

SEQ ID NO: 12702 - RNA, 25 nt, Artificial Sequence
  Synthetic Oligonucleotide
ugauuugaagcaauaugauagugau

SEQ ID NO: 12703 - RNA, 25 nt, Artificial Sequence
  Synthetic Oligonucleotide
cgacuugaagcaauauuauagugau

SEQ ID NO: 12704 - RNA, 25 nt, Artificial Sequence
  Synthetic Oligonucleotide
gggggcuauaugaagcaaucgagga

SEQ ID NO: 12705 - RNA, 25 nt, Artificial Sequence
  Synthetic Oligonucleotide
gggggcuauaugaagcaguugagga

SEQ ID NO: 12706 - RNA, 25 nt, Artificial Sequence
  Synthetic Oligonucleotide
gggggcuauaugaggcaauugagga

SEQ ID NO: 12707 - RNA, 25 nt, Artificial Sequence
  Synthetic Oligonucleotide
gggggcuguaugaagcaauugagga

SEQ ID NO: 12708 - RNA, 25 nt, Artificial Sequence
  Synthetic Oligonucleotide
ggggguuauaugaagcaauugagga

SEQ ID NO: 12709 - RNA, 25 nt, Artificial Sequence
  Synthetic Oligonucleotide
ggggacuauaugaagcaauugagga

SEQ ID NO: 12710 - RNA, 25 nt, Artificial Sequence
  Synthetic Oligonucleotide
gagggcuauaugaagcaauugagga

SEQ ID NO: 12711 - RNA, 25 nt, Artificial Sequence
  Synthetic Oligonucleotide
gwgggcuauaugaagcaauugagga

SEQ ID NO: 12712 - RNA, 25 nt, Artificial Sequence
  Synthetic Oligonucleotide
aggggcuauaugaagcaauugagga

SEQ ID NO: 12713 - RNA, 25 nt, Artificial Sequence
  Synthetic Oligonucleotide
ggggauuauaugaagcaauugagga

SEQ ID NO: 12714 - RNA, 25 nt, Artificial Sequence
  Synthetic Oligonucleotide
gagggcuauaugaagcgauugagga

SEQ ID NO: 12715 - RNA, 25 nt, Artificial Sequence
  Synthetic Oligonucleotide
gagggcuauacgaagcaauugagga

SEQ ID NO: 12716 - RNA, 25 nt, Artificial Sequence
  Synthetic Oligonucleotide
gagggcuguaugaagcaauugagga

SEQ ID NO: 12717 - RNA, 25 nt, Artificial Sequence
  Synthetic Oligonucleotide
gaggacuauaugaagcaauugagga

SEQ ID NO: 12718 - RNA, 25 nt, Artificial Sequence
  Synthetic Oligonucleotide
guggacuauaugaagcaauugagga

SEQ ID NO: 12719 - RNA, 25 nt, Artificial Sequence
  Synthetic Oligonucleotide
aggggcuauauggagcaauugagga

SEQ ID NO: 12720 - RNA, 25 nt, Artificial Sequence
  Synthetic Oligonucleotide
aagggcuauaugaugcaauugagga

SEQ ID NO: 12721 - RNA, 25 nt, Artificial Sequence
  Synthetic Oligonucleotide
aagggcuauauggagcaauugagga

SEQ ID NO: 12722 - RNA, 25 nt, Artificial Sequence
  Synthetic Oligonucleotide
ggggggcuauaugaagcaaucgagg

SEQ ID NO: 12723 - RNA, 25 nt, Artificial Sequence
  Synthetic Oligonucleotide
ggggggcuauaugaagcaguugagg

SEQ ID NO: 12724 - RNA, 25 nt, Artificial Sequence
  Synthetic Oligonucleotide
ggggggcuauaugaggcaauugagg

SEQ ID NO: 12725 - RNA, 25 nt, Artificial Sequence
  Synthetic Oligonucleotide
ggggggcuguaugaagcaauugagg

SEQ ID NO: 12726 - RNA, 25 nt, Artificial Sequence
  Synthetic Oligonucleotide
gggggguuauaugaagcaauugagg

SEQ ID NO: 12727 - RNA, 25 nt, Artificial Sequence
  Synthetic Oligonucleotide
gggggacuauaugaagcaauugagg

SEQ ID NO: 12728 - RNA, 25 nt, Artificial Sequence
  Synthetic Oligonucleotide
ggagggcuauaugaagcaauugagg

SEQ ID NO: 12729 - RNA, 25 nt, Artificial Sequence
  Synthetic Oligonucleotide
ggwgggcuauaugaagcaauugagg

SEQ ID NO: 12730 - RNA, 25 nt, Artificial Sequence
  Synthetic Oligonucleotide
gaggggcuauaugaagcaauugagg

SEQ ID NO: 12731 - RNA, 25 nt, Artificial Sequence
  Synthetic Oligonucleotide
agggggcuauaugaagcaauugagg

SEQ ID NO: 12732 - RNA, 25 nt, Artificial Sequence
  Synthetic Oligonucleotide
ugggggcuauaugaagcaauugagg

SEQ ID NO: 12733 - RNA, 25 nt, Artificial Sequence
  Synthetic Oligonucleotide
gggggauuauaugaagcaauugagg

SEQ ID NO: 12734 - RNA, 25 nt, Artificial Sequence
  Synthetic Oligonucleotide
ggagggcuauaugaagcgauugagg

SEQ ID NO: 12735 - RNA, 25 nt, Artificial Sequence
  Synthetic Oligonucleotide
ggagggcuauacgaagcaauugagg

SEQ ID NO: 12736 - RNA, 25 nt, Artificial Sequence
  Synthetic Oligonucleotide
ggagggcuguaugaagcaauugagg

SEQ ID NO: 12737 - RNA, 25 nt, Artificial Sequence
  Synthetic Oligonucleotide
ggaggacuauaugaagcaauugagg

SEQ ID NO: 12738 - RNA, 25 nt, Artificial Sequence
  Synthetic Oligonucleotide
gguggacuauaugaagcaauugagg

SEQ ID NO: 12739 - RNA, 25 nt, Artificial Sequence
  Synthetic Oligonucleotide
gaggggcuauauggagcaauugagg

SEQ ID NO: 12740 - RNA, 25 nt, Artificial Sequence
  Synthetic Oligonucleotide
gaagggcuauaugaugcaauugagg

SEQ ID NO: 12741 - RNA, 25 nt, Artificial Sequence
  Synthetic Oligonucleotide
gaagggcuauauggagcaauugagg

SEQ ID NO: 12742 - RNA, 25 nt, Artificial Sequence
  Synthetic Oligonucleotide
ugaaggggguauacauuaauacagc

SEQ ID NO: 12743 - RNA, 25 nt, Artificial Sequence
  Synthetic Oligonucleotide
ugaaggggguauacauuaauaccgc

SEQ ID NO: 12744 - RNA, 25 nt, Artificial Sequence
  Synthetic Oligonucleotide
ugaaggggguauacauuaauacggc

SEQ ID NO: 12745 - RNA, 25 nt, Artificial Sequence
  Synthetic Oligonucleotide
ugaaggggguauacauuaacacugc

SEQ ID NO: 12746 - RNA, 25 nt, Artificial Sequence
  Synthetic Oligonucleotide
ugaaggggguauacaucaauacugc

SEQ ID NO: 12747 - RNA, 25 nt, Artificial Sequence
  Synthetic Oligonucleotide
ugaaggggguauacaucaacacugc

SEQ ID NO: 12748 - RNA, 25 nt, Artificial Sequence
  Synthetic Oligonucleotide
ugaaggggguauacguuaauacugc

SEQ ID NO: 12749 - RNA, 25 nt, Artificial Sequence
  Synthetic Oligonucleotide
ugaaggggguauauauuaauacugc

SEQ ID NO: 12750 - RNA, 25 nt, Artificial Sequence
  Synthetic Oligonucleotide
ugaaggggguacacauuaauacugc

SEQ ID NO: 12751 - RNA, 25 nt, Artificial Sequence
  Synthetic Oligonucleotide
ugaaggggguguacauuaauacugc

SEQ ID NO: 12752 - RNA, 25 nt, Artificial Sequence
  Synthetic Oligonucleotide
ugaaggggguuuacauuaauacugc

SEQ ID NO: 12753 - RNA, 25 nt, Artificial Sequence
  Synthetic Oligonucleotide
ugaaggggauauacauuaauacugc

SEQ ID NO: 12754 - RNA, 25 nt, Artificial Sequence
  Synthetic Oligonucleotide
ugaagggaguauacauuaauacugc

SEQ ID NO: 12755 - RNA, 25 nt, Artificial Sequence
  Synthetic Oligonucleotide
ugaaagggguauacauuaauacugc

SEQ ID NO: 12756 - RNA, 25 nt, Artificial Sequence
  Synthetic Oligonucleotide
uaaaggggguauacauuaauacugc

SEQ ID NO: 12757 - RNA, 25 nt, Artificial Sequence
  Synthetic Oligonucleotide
ugaaggggguguacauaaacacagc

SEQ ID NO: 12758 - RNA, 25 nt, Artificial Sequence
  Synthetic Oligonucleotide
ugaaggggguguacaucaauacugc

SEQ ID NO: 12759 - RNA, 25 nt, Artificial Sequence
  Synthetic Oligonucleotide
ugaaggggguuuacauaaauacagc

SEQ ID NO: 12760 - RNA, 25 nt, Artificial Sequence
  Synthetic Oligonucleotide
ugaaggggguuuacauaaacacagc

SEQ ID NO: 12761 - RNA, 25 nt, Artificial Sequence
  Synthetic Oligonucleotide
ugaaggggguuuacauaaacauagc

SEQ ID NO: 12762 - RNA, 25 nt, Artificial Sequence
  Synthetic Oligonucleotide
ugaagggaguauacauaaacacagc

SEQ ID NO: 12763 - RNA, 25 nt, Artificial Sequence
  Synthetic Oligonucleotide
ugaagggaauauacauuaauacugc

SEQ ID NO: 12764 - RNA, 25 nt, Artificial Sequence
  Synthetic Oligonucleotide
ugaagggagucuacauaaauacagc

SEQ ID NO: 12765 - RNA, 25 nt, Artificial Sequence
  Synthetic Oligonucleotide
ugaagggaguguacauaaauacggc

SEQ ID NO: 12766 - RNA, 25 nt, Artificial Sequence
  Synthetic Oligonucleotide
ugaagggaguguacauaaacacagc

SEQ ID NO: 12767 - RNA, 25 nt, Artificial Sequence
  Synthetic Oligonucleotide
ugaagggaguguacauaaacacggc

SEQ ID NO: 12768 - RNA, 25 nt, Artificial Sequence
  Synthetic Oligonucleotide
ugaagggaguguacaucaauacugc

SEQ ID NO: 12769 - RNA, 25 nt, Artificial Sequence
  Synthetic Oligonucleotide
augaaggggguauacauuaauacag

SEQ ID NO: 12770 - RNA, 25 nt, Artificial Sequence
  Synthetic Oligonucleotide
augaaggggguauacauuaauaccg

SEQ ID NO: 12771 - RNA, 25 nt, Artificial Sequence
  Synthetic Oligonucleotide
augaaggggguauacauuaauacgg

SEQ ID NO: 12772 - RNA, 25 nt, Artificial Sequence
  Synthetic Oligonucleotide
augaaggggguauacauuaacacug

SEQ ID NO: 12773 - RNA, 25 nt, Artificial Sequence
  Synthetic Oligonucleotide
augaaggggguauacaucaauacug

SEQ ID NO: 12774 - RNA, 25 nt, Artificial Sequence
  Synthetic Oligonucleotide
augaaggggguauacaucaacacug

SEQ ID NO: 12775 - RNA, 25 nt, Artificial Sequence
  Synthetic Oligonucleotide
augaaggggguauacguuaauacug

SEQ ID NO: 12776 - RNA, 25 nt, Artificial Sequence
  Synthetic Oligonucleotide
augaaggggguauauauuaauacug

SEQ ID NO: 12777 - RNA, 25 nt, Artificial Sequence
  Synthetic Oligonucleotide
augaaggggguacacauuaauacug

SEQ ID NO: 12778 - RNA, 25 nt, Artificial Sequence
  Synthetic Oligonucleotide
augaaggggguguacauuaauacug

SEQ ID NO: 12779 - RNA, 25 nt, Artificial Sequence
  Synthetic Oligonucleotide
augaaggggguuuacauuaauacug

SEQ ID NO: 12780 - RNA, 25 nt, Artificial Sequence
  Synthetic Oligonucleotide
augaaggggauauacauuaauacug

SEQ ID NO: 12781 - RNA, 25 nt, Artificial Sequence
  Synthetic Oligonucleotide
augaagggaguauacauuaauacug

SEQ ID NO: 12782 - RNA, 25 nt, Artificial Sequence
  Synthetic Oligonucleotide
augaaagggguauacauuaauacug

SEQ ID NO: 12783 - RNA, 25 nt, Artificial Sequence
  Synthetic Oligonucleotide
auaaaggggguauacauuaauacug

SEQ ID NO: 12784 - RNA, 25 nt, Artificial Sequence
  Synthetic Oligonucleotide
gugaaggggguauacauuaauacug

SEQ ID NO: 12785 - RNA, 25 nt, Artificial Sequence
  Synthetic Oligonucleotide
augaaggggguguacauaaacacag

SEQ ID NO: 12786 - RNA, 25 nt, Artificial Sequence
  Synthetic Oligonucleotide
augaaggggguguacaucaauacug

SEQ ID NO: 12787 - RNA, 25 nt, Artificial Sequence
  Synthetic Oligonucleotide
augaaggggguuuacauaaauacag

SEQ ID NO: 12788 - RNA, 25 nt, Artificial Sequence
  Synthetic Oligonucleotide
augaaggggguuuacauaaacacag

SEQ ID NO: 12789 - RNA, 25 nt, Artificial Sequence
  Synthetic Oligonucleotide
augaaggggguuuacauaaacauag

SEQ ID NO: 12790 - RNA, 25 nt, Artificial Sequence
  Synthetic Oligonucleotide
augaagggaguauacauaaacacag

SEQ ID NO: 12791 - RNA, 25 nt, Artificial Sequence
  Synthetic Oligonucleotide
augaagggaauauacauuaauacug

SEQ ID NO: 12792 - RNA, 25 nt, Artificial Sequence
  Synthetic Oligonucleotide
augaagggagucuacauaaauacag

SEQ ID NO: 12793 - RNA, 25 nt, Artificial Sequence
  Synthetic Oligonucleotide
augaagggaguguacauaaauacgg

SEQ ID NO: 12794 - RNA, 25 nt, Artificial Sequence
  Synthetic Oligonucleotide
augaagggaguguacauaaacacag

SEQ ID NO: 12795 - RNA, 25 nt, Artificial Sequence
  Synthetic Oligonucleotide
augaagggaguguacauaaacacgg

SEQ ID NO: 12796 - RNA, 25 nt, Artificial Sequence
  Synthetic Oligonucleotide
augaagggaguguacaucaauacug

SEQ ID NO: 12797 - RNA, 25 nt, Artificial Sequence
  Synthetic Oligonucleotide
aaugaaggggguauacauuaauaca

SEQ ID NO: 12798 - RNA, 25 nt, Artificial Sequence
  Synthetic Oligonucleotide
aaugaaggggguauacauuaauacc

SEQ ID NO: 12799 - RNA, 25 nt, Artificial Sequence
  Synthetic Oligonucleotide
aaugaaggggguauacauuaauacg

SEQ ID NO: 12800 - RNA, 25 nt, Artificial Sequence
  Synthetic Oligonucleotide
aaugaaggggguauacauuaacacu

SEQ ID NO: 12801 - RNA, 25 nt, Artificial Sequence
  Synthetic Oligonucleotide
aaugaaggggguauacaucaauacu

SEQ ID NO: 12802 - RNA, 25 nt, Artificial Sequence
  Synthetic Oligonucleotide
aaugaaggggguauacaucaacacu

SEQ ID NO: 12803 - RNA, 25 nt, Artificial Sequence
  Synthetic Oligonucleotide
aaugaaggggguauacguuaauacu

SEQ ID NO: 12804 - RNA, 25 nt, Artificial Sequence
  Synthetic Oligonucleotide
aaugaaggggguauauauuaauacu

SEQ ID NO: 12805 - RNA, 25 nt, Artificial Sequence
  Synthetic Oligonucleotide
aaugaaggggguacacauuaauacu

SEQ ID NO: 12806 - RNA, 25 nt, Artificial Sequence
  Synthetic Oligonucleotide
aaugaaggggguguacauuaauacu

SEQ ID NO: 12807 - RNA, 25 nt, Artificial Sequence
  Synthetic Oligonucleotide
aaugaaggggguuuacauuaauacu

SEQ ID NO: 12808 - RNA, 25 nt, Artificial Sequence
  Synthetic Oligonucleotide
aaugaaggggauauacauuaauacu

SEQ ID NO: 12809 - RNA, 25 nt, Artificial Sequence
  Synthetic Oligonucleotide
aaugaagggaguauacauuaauacu

SEQ ID NO: 12810 - RNA, 25 nt, Artificial Sequence
  Synthetic Oligonucleotide
aaugaaagggguauacauuaauacu

SEQ ID NO: 12811 - RNA, 25 nt, Artificial Sequence
  Synthetic Oligonucleotide
aauaaaggggguauacauuaauacu

SEQ ID NO: 12812 - RNA, 25 nt, Artificial Sequence
  Synthetic Oligonucleotide
agugaaggggguauacauuaauacu

SEQ ID NO: 12813 - RNA, 25 nt, Artificial Sequence
  Synthetic Oligonucleotide
aaugaaggggguguacauaaacaca

SEQ ID NO: 12814 - RNA, 25 nt, Artificial Sequence
  Synthetic Oligonucleotide
aaugaaggggguguacaucaauacu

SEQ ID NO: 12815 - RNA, 25 nt, Artificial Sequence
  Synthetic Oligonucleotide
aaugaaggggguuuacauaaauaca

SEQ ID NO: 12816 - RNA, 25 nt, Artificial Sequence
  Synthetic Oligonucleotide
aaugaaggggguuuacauaaacaca

SEQ ID NO: 12817 - RNA, 25 nt, Artificial Sequence
  Synthetic Oligonucleotide
aaugaaggggguuuacauaaacaua

SEQ ID NO: 12818 - RNA, 25 nt, Artificial Sequence
  Synthetic Oligonucleotide
aaugaagggaguauacauaaacaca

SEQ ID NO: 12819 - RNA, 25 nt, Artificial Sequence
  Synthetic Oligonucleotide
aaugaagggaauauacauuaauacu

SEQ ID NO: 12820 - RNA, 25 nt, Artificial Sequence
  Synthetic Oligonucleotide
aaugaagggagucuacauaaauaca

SEQ ID NO: 12821 - RNA, 25 nt, Artificial Sequence
  Synthetic Oligonucleotide
aaugaagggaguguacauaaauacg

SEQ ID NO: 12822 - RNA, 25 nt, Artificial Sequence
  Synthetic Oligonucleotide
aaugaagggaguguacauaaacaca

SEQ ID NO: 12823 - RNA, 25 nt, Artificial Sequence
  Synthetic Oligonucleotide
aaugaagggaguguacauaaacacg

SEQ ID NO: 12824 - RNA, 25 nt, Artificial Sequence
  Synthetic Oligonucleotide
aaugaagggaguguacaucaauacu

SEQ ID NO: 12825 - RNA, 25 nt, Artificial Sequence
  Synthetic Oligonucleotide
gcaauaugauagugacgaaccuaaa

SEQ ID NO: 12826 - RNA, 25 nt, Artificial Sequence
  Synthetic Oligonucleotide
gcaauaugauagugacgaaccagaa

SEQ ID NO: 12827 - RNA, 25 nt, Artificial Sequence
  Synthetic Oligonucleotide
gcaauaugauagugacgagccugaa

SEQ ID NO: 12828 - RNA, 25 nt, Artificial Sequence
  Synthetic Oligonucleotide
gcaauaugauagugacggaccugaa

SEQ ID NO: 12829 - RNA, 25 nt, Artificial Sequence
  Synthetic Oligonucleotide
gcaauaugauagugaagaaccugaa

SEQ ID NO: 12830 - RNA, 25 nt, Artificial Sequence
  Synthetic Oligonucleotide
gcaauaugauagugaagaaccuaaa

SEQ ID NO: 12831 - RNA, 25 nt, Artificial Sequence
  Synthetic Oligonucleotide
gcaauaugauagugaugaaccugaa

SEQ ID NO: 12832 - RNA, 25 nt, Artificial Sequence
  Synthetic Oligonucleotide
gcaauaugauagugaugaaccugga

SEQ ID NO: 12833 - RNA, 25 nt, Artificial Sequence
  Synthetic Oligonucleotide
gcaauaugauagugaugaaccagaa

SEQ ID NO: 12834 - RNA, 25 nt, Artificial Sequence
  Synthetic Oligonucleotide
gcaauaugauagugaugaaccggaa

SEQ ID NO: 12835 - RNA, 25 nt, Artificial Sequence
  Synthetic Oligonucleotide
gcaauaugauaguaacgaaccugaa

SEQ ID NO: 12836 - RNA, 25 nt, Artificial Sequence
  Synthetic Oligonucleotide
gcaauaugauagcgacgaaccugaa

SEQ ID NO: 12837 - RNA, 25 nt, Artificial Sequence
  Synthetic Oligonucleotide
gcaauaugauagcgacgaaccugag

SEQ ID NO: 12838 - RNA, 25 nt, Artificial Sequence
  Synthetic Oligonucleotide
gcaauaugauaaugacgaaccugaa

SEQ ID NO: 12839 - RNA, 25 nt, Artificial Sequence
  Synthetic Oligonucleotide
gcaauaugacagugacgaaccugaa

SEQ ID NO: 12840 - RNA, 25 nt, Artificial Sequence
  Synthetic Oligonucleotide
gcaauauaauagugacgaaccugaa

SEQ ID NO: 12841 - RNA, 25 nt, Artificial Sequence
  Synthetic Oligonucleotide
gcaauacgauagugacgaaccugaa

SEQ ID NO: 12842 - RNA, 25 nt, Artificial Sequence
  Synthetic Oligonucleotide
gcaguaugauagugacgaaccugaa

SEQ ID NO: 12843 - RNA, 25 nt, Artificial Sequence
  Synthetic Oligonucleotide
gcaguaugauagugacgaaacugaa

SEQ ID NO: 12844 - RNA, 25 nt, Artificial Sequence
  Synthetic Oligonucleotide
acaauaugauagugacgaaccugaa

SEQ ID NO: 12845 - RNA, 25 nt, Artificial Sequence
  Synthetic Oligonucleotide
gcaauaugauagugaugagccugag

SEQ ID NO: 12846 - RNA, 25 nt, Artificial Sequence
  Synthetic Oligonucleotide
gcaauaugauagugauggaccugaa

SEQ ID NO: 12847 - RNA, 25 nt, Artificial Sequence
  Synthetic Oligonucleotide
gcaauaugacagcgacgaaccugaa

SEQ ID NO: 12848 - RNA, 25 nt, Artificial Sequence
  Synthetic Oligonucleotide
gcaauauuauagugaugaaccagaa

SEQ ID NO: 12849 - RNA, 25 nt, Artificial Sequence
  Synthetic Oligonucleotide
gcaguaugacagugaugaaccagag

SEQ ID NO: 12850 - RNA, 25 nt, Artificial Sequence
  Synthetic Oligonucleotide
aagcaauaugauagugacgaaccua

SEQ ID NO: 12851 - RNA, 25 nt, Artificial Sequence
  Synthetic Oligonucleotide
aagcaauaugauagugacgaaccag

SEQ ID NO: 12852 - RNA, 25 nt, Artificial Sequence
  Synthetic Oligonucleotide
aagcaauaugauagugacgagccug

SEQ ID NO: 12853 - RNA, 25 nt, Artificial Sequence
  Synthetic Oligonucleotide
aagcaauaugauagugacggaccug

SEQ ID NO: 12854 - RNA, 25 nt, Artificial Sequence
  Synthetic Oligonucleotide
aagcaauaugauagugaagaaccug

SEQ ID NO: 12855 - RNA, 25 nt, Artificial Sequence
  Synthetic Oligonucleotide
aagcaauaugauagugaagaaccua

SEQ ID NO: 12856 - RNA, 25 nt, Artificial Sequence
  Synthetic Oligonucleotide
aagcaauaugauagugaugaaccug

SEQ ID NO: 12857 - RNA, 25 nt, Artificial Sequence
  Synthetic Oligonucleotide
aagcaauaugauagugaugaaccag

SEQ ID NO: 12858 - RNA, 25 nt, Artificial Sequence
  Synthetic Oligonucleotide
aagcaauaugauagugaugaaccgg

SEQ ID NO: 12859 - RNA, 25 nt, Artificial Sequence
  Synthetic Oligonucleotide
aagcaauaugauagugaugagccug

SEQ ID NO: 12860 - RNA, 25 nt, Artificial Sequence
  Synthetic Oligonucleotide
aagcaauaugauagugauggaccug

SEQ ID NO: 12861 - RNA, 25 nt, Artificial Sequence
  Synthetic Oligonucleotide
aagcaauaugauaguaacgaaccug

SEQ ID NO: 12862 - RNA, 25 nt, Artificial Sequence
  Synthetic Oligonucleotide
aagcaauaugauagcgacgaaccug

SEQ ID NO: 12863 - RNA, 25 nt, Artificial Sequence
  Synthetic Oligonucleotide
aagcaauaugauaaugacgaaccug

SEQ ID NO: 12864 - RNA, 25 nt, Artificial Sequence
  Synthetic Oligonucleotide
aagcaauaugacagugacgaaccug

SEQ ID NO: 12865 - RNA, 25 nt, Artificial Sequence
  Synthetic Oligonucleotide
aagcaauauaauagugacgaaccug

SEQ ID NO: 12866 - RNA, 25 nt, Artificial Sequence
  Synthetic Oligonucleotide
aagcaauacgauagugacgaaccug

SEQ ID NO: 12867 - RNA, 25 nt, Artificial Sequence
  Synthetic Oligonucleotide
aagcaguaugauagugacgaaccug

SEQ ID NO: 12868 - RNA, 25 nt, Artificial Sequence
  Synthetic Oligonucleotide
aagcaguaugauagugacgaaacug

SEQ ID NO: 12869 - RNA, 25 nt, Artificial Sequence
  Synthetic Oligonucleotide
aaacaauaugauagugacgaaccug

SEQ ID NO: 12870 - RNA, 25 nt, Artificial Sequence
  Synthetic Oligonucleotide
aggcaauaugauagugacgaaccug

SEQ ID NO: 12871 - RNA, 25 nt, Artificial Sequence
  Synthetic Oligonucleotide
aagcaauaugacagcgacgaaccug

SEQ ID NO: 12872 - RNA, 25 nt, Artificial Sequence
  Synthetic Oligonucleotide
aagcaauauuauagugaugaaccag

SEQ ID NO: 12873 - RNA, 25 nt, Artificial Sequence
  Synthetic Oligonucleotide
aagcaguaugacagugaugagccaa

SEQ ID NO: 12874 - RNA, 25 nt, Artificial Sequence
  Synthetic Oligonucleotide
aaacaauaugacagugaugagccaa

SEQ ID NO: 12875 - RNA, 25 nt, Artificial Sequence
  Synthetic Oligonucleotide
agcaauaugauagugacgaaccuaa

SEQ ID NO: 12876 - RNA, 25 nt, Artificial Sequence
  Synthetic Oligonucleotide
agcaauaugauagugacgaaccaga

SEQ ID NO: 12877 - RNA, 25 nt, Artificial Sequence
  Synthetic Oligonucleotide
agcaauaugauagugacgagccuga

SEQ ID NO: 12878 - RNA, 25 nt, Artificial Sequence
  Synthetic Oligonucleotide
agcaauaugauagugacggaccuga

SEQ ID NO: 12879 - RNA, 25 nt, Artificial Sequence
  Synthetic Oligonucleotide
agcaauaugauagugaagaaccuga

SEQ ID NO: 12880 - RNA, 25 nt, Artificial Sequence
  Synthetic Oligonucleotide
agcaauaugauagugaagaaccuaa

SEQ ID NO: 12881 - RNA, 25 nt, Artificial Sequence
  Synthetic Oligonucleotide
agcaauaugauagugaugaaccuga

SEQ ID NO: 12882 - RNA, 25 nt, Artificial Sequence
  Synthetic Oligonucleotide
agcaauaugauagugaugaaccugg

SEQ ID NO: 12883 - RNA, 25 nt, Artificial Sequence
  Synthetic Oligonucleotide
agcaauaugauagugaugaaccaga

SEQ ID NO: 12884 - RNA, 25 nt, Artificial Sequence
  Synthetic Oligonucleotide
agcaauaugauagugaugaaccgga

SEQ ID NO: 12885 - RNA, 25 nt, Artificial Sequence
  Synthetic Oligonucleotide
agcaauaugauagugaugagccuga

SEQ ID NO: 12886 - RNA, 25 nt, Artificial Sequence
  Synthetic Oligonucleotide
agcaauaugauaguaacgaaccuga

SEQ ID NO: 12887 - RNA, 25 nt, Artificial Sequence
  Synthetic Oligonucleotide
agcaauaugauagcgacgaaccuga

SEQ ID NO: 12888 - RNA, 25 nt, Artificial Sequence
  Synthetic Oligonucleotide
agcaauaugauaaugacgaaccuga

SEQ ID NO: 12889 - RNA, 25 nt, Artificial Sequence
  Synthetic Oligonucleotide
agcaauaugacagugacgaaccuga

SEQ ID NO: 12890 - RNA, 25 nt, Artificial Sequence
  Synthetic Oligonucleotide
agcaauauaauagugacgaaccuga

SEQ ID NO: 12891 - RNA, 25 nt, Artificial Sequence
  Synthetic Oligonucleotide
agcaauacgauagugacgaaccuga

SEQ ID NO: 12892 - RNA, 25 nt, Artificial Sequence
  Synthetic Oligonucleotide
agcaguaugauagugacgaaccuga

SEQ ID NO: 12893 - RNA, 25 nt, Artificial Sequence
  Synthetic Oligonucleotide
agcaguaugauagugacgaaacuga

SEQ ID NO: 12894 - RNA, 25 nt, Artificial Sequence
  Synthetic Oligonucleotide
aacaauaugauagugacgaaccuga

SEQ ID NO: 12895 - RNA, 25 nt, Artificial Sequence
  Synthetic Oligonucleotide
ggcaauaugauagugacgaaccuga

SEQ ID NO: 12896 - RNA, 25 nt, Artificial Sequence
  Synthetic Oligonucleotide
agcaauaugauagugauggaccuga

SEQ ID NO: 12897 - RNA, 25 nt, Artificial Sequence
  Synthetic Oligonucleotide
agcaauaugacagcgacgaaccuga

SEQ ID NO: 12898 - RNA, 25 nt, Artificial Sequence
  Synthetic Oligonucleotide
agcaauauuauagugaugaaccaga

SEQ ID NO: 12899 - RNA, 25 nt, Artificial Sequence
  Synthetic Oligonucleotide
agcaguaugacagugaugagccaaa

SEQ ID NO: 12900 - RNA, 25 nt, Artificial Sequence
  Synthetic Oligonucleotide
aacaauaugacagugaugagccaaa

SEQ ID NO: 12901 - RNA, 25 nt, Artificial Sequence
  Synthetic Oligonucleotide
caauaugauagugacgaaccugaaa

SEQ ID NO: 12902 - RNA, 25 nt, Artificial Sequence
  Synthetic Oligonucleotide
caauaugauagugacgaaccugaac

SEQ ID NO: 12903 - RNA, 25 nt, Artificial Sequence
  Synthetic Oligonucleotide
caauaugauagugacgaaccugaag

SEQ ID NO: 12904 - RNA, 25 nt, Artificial Sequence
  Synthetic Oligonucleotide
caauaugauagugacgaaccuaaau

SEQ ID NO: 12905 - RNA, 25 nt, Artificial Sequence
  Synthetic Oligonucleotide
caauaugauagugacgaaccagaau

SEQ ID NO: 12906 - RNA, 25 nt, Artificial Sequence
  Synthetic Oligonucleotide
caauaugauagugacgagccugaau

SEQ ID NO: 12907 - RNA, 25 nt, Artificial Sequence
  Synthetic Oligonucleotide
caauaugauagugacggaccugaau

SEQ ID NO: 12908 - RNA, 25 nt, Artificial Sequence
  Synthetic Oligonucleotide
caauaugauagugaagaaccugaau

SEQ ID NO: 12909 - RNA, 25 nt, Artificial Sequence
  Synthetic Oligonucleotide
caauaugauagugaagaaccuaaau

SEQ ID NO: 12910 - RNA, 25 nt, Artificial Sequence
  Synthetic Oligonucleotide
caauaugauagugaugaaccugaau

SEQ ID NO: 12911 - RNA, 25 nt, Artificial Sequence
  Synthetic Oligonucleotide
caauaugauagugaugaaccuggau

SEQ ID NO: 12912 - RNA, 25 nt, Artificial Sequence
  Synthetic Oligonucleotide
caauaugauagugaugaaccagaau

SEQ ID NO: 12913 - RNA, 25 nt, Artificial Sequence
  Synthetic Oligonucleotide
caauaugauagugaugaaccggaau

SEQ ID NO: 12914 - RNA, 25 nt, Artificial Sequence
  Synthetic Oligonucleotide
caauaugauaguaacgaaccugaau

SEQ ID NO: 12915 - RNA, 25 nt, Artificial Sequence
  Synthetic Oligonucleotide
caauaugauagcgacgaaccugaau

SEQ ID NO: 12916 - RNA, 25 nt, Artificial Sequence
  Synthetic Oligonucleotide
caauaugauagcgacgaaccugagu

SEQ ID NO: 12917 - RNA, 25 nt, Artificial Sequence
  Synthetic Oligonucleotide
caauaugauaaugacgaaccugaau

SEQ ID NO: 12918 - RNA, 25 nt, Artificial Sequence
  Synthetic Oligonucleotide
caauaugacagugacgaaccugaau

SEQ ID NO: 12919 - RNA, 25 nt, Artificial Sequence
  Synthetic Oligonucleotide
caauaugacagugacgaaccugaac

SEQ ID NO: 12920 - RNA, 25 nt, Artificial Sequence
  Synthetic Oligonucleotide
caauauaauagugacgaaccugaau

SEQ ID NO: 12921 - RNA, 25 nt, Artificial Sequence
  Synthetic Oligonucleotide
caauacgauagugacgaaccugaau

SEQ ID NO: 12922 - RNA, 25 nt, Artificial Sequence
  Synthetic Oligonucleotide
caguaugauagugacgaaccugaau

SEQ ID NO: 12923 - RNA, 25 nt, Artificial Sequence
  Synthetic Oligonucleotide
caguaugauagugacgaaccugaaa

SEQ ID NO: 12924 - RNA, 25 nt, Artificial Sequence
  Synthetic Oligonucleotide
caauaugauagugaugagccugagu

SEQ ID NO: 12925 - RNA, 25 nt, Artificial Sequence
  Synthetic Oligonucleotide
caauaugauagugauggaccugaau

SEQ ID NO: 12926 - RNA, 25 nt, Artificial Sequence
  Synthetic Oligonucleotide
caauaugacagcgacgaaccugaau

SEQ ID NO: 12927 - RNA, 25 nt, Artificial Sequence
  Synthetic Oligonucleotide
caauauuauagugaugaaccagaau

SEQ ID NO: 12928 - RNA, 25 nt, Artificial Sequence
  Synthetic Oligonucleotide
caguaugauagugacgaaacugaau

SEQ ID NO: 12929 - RNA, 25 nt, Artificial Sequence
  Synthetic Oligonucleotide
caauaugacagugaugagccaaaaa

SEQ ID NO: 12930 - RNA, 25 nt, Artificial Sequence
  Synthetic Oligonucleotide
caguaugacagugaugaaccagaau

SEQ ID NO: 12931 - RNA, 25 nt, Artificial Sequence
  Synthetic Oligonucleotide
caguaugacagugaugaaccagagu

SEQ ID NO: 12932 - RNA, 25 nt, Artificial Sequence
  Synthetic Oligonucleotide
caguaugacagugaugaaccagagc

SEQ ID NO: 12933 - RNA, 25 nt, Artificial Sequence
  Synthetic Oligonucleotide
aauaugauagugacgaaccugaauc

SEQ ID NO: 12934 - RNA, 25 nt, Artificial Sequence
  Synthetic Oligonucleotide
aauaugauagugacgaaccugaaau

SEQ ID NO: 12935 - RNA, 25 nt, Artificial Sequence
  Synthetic Oligonucleotide
aauaugauagugacgaaccugaacu

SEQ ID NO: 12936 - RNA, 25 nt, Artificial Sequence
  Synthetic Oligonucleotide
aauaugauagugacgaaccugaagu

SEQ ID NO: 12937 - RNA, 25 nt, Artificial Sequence
  Synthetic Oligonucleotide
aauaugauagugacgaaccuaaauu

SEQ ID NO: 12938 - RNA, 25 nt, Artificial Sequence
  Synthetic Oligonucleotide
aauaugauagugacgaaccagaauu

SEQ ID NO: 12939 - RNA, 25 nt, Artificial Sequence
  Synthetic Oligonucleotide
aauaugauagugacgagccugaauu

SEQ ID NO: 12940 - RNA, 25 nt, Artificial Sequence
  Synthetic Oligonucleotide
aauaugauagugacgagccugaauc

SEQ ID NO: 12941 - RNA, 25 nt, Artificial Sequence
  Synthetic Oligonucleotide
aauaugauagugacggaccugaauu

SEQ ID NO: 12942 - RNA, 25 nt, Artificial Sequence
  Synthetic Oligonucleotide
aauaugauagugaagaaccugaauu

SEQ ID NO: 12943 - RNA, 25 nt, Artificial Sequence
  Synthetic Oligonucleotide
aauaugauagugaagaaccuaaauu

SEQ ID NO: 12944 - RNA, 25 nt, Artificial Sequence
  Synthetic Oligonucleotide
aauaugauagugaugaaccugaauu

SEQ ID NO: 12945 - RNA, 25 nt, Artificial Sequence
  Synthetic Oligonucleotide
aauaugauagugaugaaccuggauu

SEQ ID NO: 12946 - RNA, 25 nt, Artificial Sequence
  Synthetic Oligonucleotide
aauaugauagugaugaaccagaauu

SEQ ID NO: 12947 - RNA, 25 nt, Artificial Sequence
  Synthetic Oligonucleotide
aauaugauagugaugaaccggaauu

SEQ ID NO: 12948 - RNA, 25 nt, Artificial Sequence
  Synthetic Oligonucleotide
aauaugauaguaacgaaccugaauu

SEQ ID NO: 12949 - RNA, 25 nt, Artificial Sequence
  Synthetic Oligonucleotide
aauaugauagcgacgaaccugaauu

SEQ ID NO: 12950 - RNA, 25 nt, Artificial Sequence
  Synthetic Oligonucleotide
aauaugauagcgacgaaccugaguu

SEQ ID NO: 12951 - RNA, 25 nt, Artificial Sequence
  Synthetic Oligonucleotide
aauaugauaaugacgaaccugaauu

SEQ ID NO: 12952 - RNA, 25 nt, Artificial Sequence
  Synthetic Oligonucleotide
aauaugacagugacgaaccugaauu

SEQ ID NO: 12953 - RNA, 25 nt, Artificial Sequence
  Synthetic Oligonucleotide
aauaugacagugacgaaccugaacu

SEQ ID NO: 12954 - RNA, 25 nt, Artificial Sequence
  Synthetic Oligonucleotide
aauauaauagugacgaaccugaauu

SEQ ID NO: 12955 - RNA, 25 nt, Artificial Sequence
  Synthetic Oligonucleotide
aauacgauagugacgaaccugaauu

SEQ ID NO: 12956 - RNA, 25 nt, Artificial Sequence
  Synthetic Oligonucleotide
aguaugauagugacgaaccugaauu

SEQ ID NO: 12957 - RNA, 25 nt, Artificial Sequence
  Synthetic Oligonucleotide
aguaugauagugacgaaccugaaau

SEQ ID NO: 12958 - RNA, 25 nt, Artificial Sequence
  Synthetic Oligonucleotide
aauaugauagugaugagccugaguu

SEQ ID NO: 12959 - RNA, 25 nt, Artificial Sequence
  Synthetic Oligonucleotide
aauaugauagugauggaccugaauu

SEQ ID NO: 12960 - RNA, 25 nt, Artificial Sequence
  Synthetic Oligonucleotide
aauaugacagcgacgaaccugaauu

SEQ ID NO: 12961 - RNA, 25 nt, Artificial Sequence
  Synthetic Oligonucleotide
aauauuauagugaugaaccagaauu

SEQ ID NO: 12962 - RNA, 25 nt, Artificial Sequence
  Synthetic Oligonucleotide
aguaugauagugacgaaacugaauu

SEQ ID NO: 12963 - RNA, 25 nt, Artificial Sequence
  Synthetic Oligonucleotide
aauaugacagugaugagccaaaaau

SEQ ID NO: 12964 - RNA, 25 nt, Artificial Sequence
  Synthetic Oligonucleotide
aguaugacagugaugaaccagaauc

SEQ ID NO: 12965 - RNA, 25 nt, Artificial Sequence
  Synthetic Oligonucleotide
aguaugacagugaugaaccagaguu

SEQ ID NO: 12966 - RNA, 25 nt, Artificial Sequence
  Synthetic Oligonucleotide
aguaugacagugaugaaccagaguc

SEQ ID NO: 12967 - RNA, 25 nt, Artificial Sequence
  Synthetic Oligonucleotide
aguaugacagugaugaaccagagcc

SEQ ID NO: 12968 - RNA, 25 nt, Artificial Sequence
  Synthetic Oligonucleotide
uccuuucgucaguccgagagaggcg

SEQ ID NO: 12969 - RNA, 25 nt, Artificial Sequence
  Synthetic Oligonucleotide
uccuuucgucaguccgagagaggag

SEQ ID NO: 12970 - RNA, 25 nt, Artificial Sequence
  Synthetic Oligonucleotide
uccuuucgucagucagaaagaggcg

SEQ ID NO: 12971 - RNA, 25 nt, Artificial Sequence
  Synthetic Oligonucleotide
uccuuucgucagucugaaagaggcg

SEQ ID NO: 12972 - RNA, 25 nt, Artificial Sequence
  Synthetic Oligonucleotide
uccuuucgucaauccgaaagaggcg

SEQ ID NO: 12973 - RNA, 25 nt, Artificial Sequence
  Synthetic Oligonucleotide
uccuuucgucuguccgaaagaggcg

SEQ ID NO: 12974 - RNA, 25 nt, Artificial Sequence
  Synthetic Oligonucleotide
uccuuucgccaguccgaaagaggcg

SEQ ID NO: 12975 - RNA, 25 nt, Artificial Sequence
  Synthetic Oligonucleotide
uccuuucaucaguccgaaagaggcg

SEQ ID NO: 12976 - RNA, 25 nt, Artificial Sequence
  Synthetic Oligonucleotide
ucuuuucgucaguccgaaagaggcg

SEQ ID NO: 12977 - RNA, 25 nt, Artificial Sequence
  Synthetic Oligonucleotide
uccuuucgucaauccgagagaggcg

SEQ ID NO: 12978 - RNA, 25 nt, Artificial Sequence
  Synthetic Oligonucleotide
ucuuuucgucaguccgagagaggcg

SEQ ID NO: 12979 - RNA, 25 nt, Artificial Sequence
  Synthetic Oligonucleotide
ccuuucgucaguccgagagaggcga

SEQ ID NO: 12980 - RNA, 25 nt, Artificial Sequence
  Synthetic Oligonucleotide
ccuuucgucaguccgagagaggaga

SEQ ID NO: 12981 - RNA, 25 nt, Artificial Sequence
  Synthetic Oligonucleotide
ccuuucgucagucagaaagaggcga

SEQ ID NO: 12982 - RNA, 25 nt, Artificial Sequence
  Synthetic Oligonucleotide
ccuuucgucagucugaaagaggcga

SEQ ID NO: 12983 - RNA, 25 nt, Artificial Sequence
  Synthetic Oligonucleotide
ccuuucgucaauccgaaagaggcga

SEQ ID NO: 12984 - RNA, 25 nt, Artificial Sequence
  Synthetic Oligonucleotide
ccuuucgucuguccgaaagaggcga

SEQ ID NO: 12985 - RNA, 25 nt, Artificial Sequence
  Synthetic Oligonucleotide
ccuuucgccaguccgaaagaggcga

SEQ ID NO: 12986 - RNA, 25 nt, Artificial Sequence
  Synthetic Oligonucleotide
ccuuucaucaguccgaaagaggcga

SEQ ID NO: 12987 - RNA, 25 nt, Artificial Sequence
  Synthetic Oligonucleotide
cuuuucgucaguccgaaagaggcga

SEQ ID NO: 12988 - RNA, 25 nt, Artificial Sequence
  Synthetic Oligonucleotide
ccuuucgucaauccgagagaggcga

SEQ ID NO: 12989 - RNA, 25 nt, Artificial Sequence
  Synthetic Oligonucleotide
cuuuucgucaguccgagagaggcga

SEQ ID NO: 12990 - RNA, 25 nt, Artificial Sequence
  Synthetic Oligonucleotide
ugaagcaauaugauagugacgagcc

SEQ ID NO: 12991 - RNA, 25 nt, Artificial Sequence
  Synthetic Oligonucleotide
ugaagcaauaugauagugaagaacc

SEQ ID NO: 12992 - RNA, 25 nt, Artificial Sequence
  Synthetic Oligonucleotide
ugaagcaauaugauagugaugaacc

SEQ ID NO: 12993 - RNA, 25 nt, Artificial Sequence
  Synthetic Oligonucleotide
ugaagcaauaugauagugaugagcc

SEQ ID NO: 12994 - RNA, 25 nt, Artificial Sequence
  Synthetic Oligonucleotide
ugaagcaauaugauagugauggacc

SEQ ID NO: 12995 - RNA, 25 nt, Artificial Sequence
  Synthetic Oligonucleotide
ugaagcaauaugauaguaacgaacc

SEQ ID NO: 12996 - RNA, 25 nt, Artificial Sequence
  Synthetic Oligonucleotide
ugaagcaauaugauagcgacgaacc

SEQ ID NO: 12997 - RNA, 25 nt, Artificial Sequence
  Synthetic Oligonucleotide
ugaagcaauaugauaaugacgaacc

SEQ ID NO: 12998 - RNA, 25 nt, Artificial Sequence
  Synthetic Oligonucleotide
ugaagcaauaugacagugacgaacc

SEQ ID NO: 12999 - RNA, 25 nt, Artificial Sequence
  Synthetic Oligonucleotide
ugaagcaauauaauagugacgaacc

SEQ ID NO: 13000 - RNA, 25 nt, Artificial Sequence
  Synthetic Oligonucleotide
ugaagcaauauuauagugaugaacc

SEQ ID NO: 13001 - RNA, 25 nt, Artificial Sequence
  Synthetic Oligonucleotide
ugaagcaauacgauagugacgaacc

SEQ ID NO: 13002 - RNA, 25 nt, Artificial Sequence
  Synthetic Oligonucleotide
ugaagcaguaugauagugacgaacc

SEQ ID NO: 13003 - RNA, 25 nt, Artificial Sequence
  Synthetic Oligonucleotide
ugaagcaguaugauagugacgaaac

SEQ ID NO: 13004 - RNA, 25 nt, Artificial Sequence
  Synthetic Oligonucleotide
ugaaacaauaugauagugacgaacc

SEQ ID NO: 13005 - RNA, 25 nt, Artificial Sequence
  Synthetic Oligonucleotide
ugaggcaauaugauagugacgaacc

SEQ ID NO: 13006 - RNA, 25 nt, Artificial Sequence
  Synthetic Oligonucleotide
uaaagcaauaugauagugacgaacc

SEQ ID NO: 13007 - RNA, 25 nt, Artificial Sequence
  Synthetic Oligonucleotide
uaaagcaauaugauagugacggacc

SEQ ID NO: 13008 - RNA, 25 nt, Artificial Sequence
  Synthetic Oligonucleotide
ugaagcaauaugacagcgacgaacc

SEQ ID NO: 13009 - RNA, 25 nt, Artificial Sequence
  Synthetic Oligonucleotide
uaaagcaguaugacagugaugagcc

SEQ ID NO: 13010 - RNA, 25 nt, Artificial Sequence
  Synthetic Oligonucleotide
uaaaacaauaugacagugaugagcc

SEQ ID NO: 13011 - RNA, 25 nt, Artificial Sequence
  Synthetic Oligonucleotide
gaagcaauaugauagugacgaacca

SEQ ID NO: 13012 - RNA, 25 nt, Artificial Sequence
  Synthetic Oligonucleotide
gaagcaauaugauagugacgagccu

SEQ ID NO: 13013 - RNA, 25 nt, Artificial Sequence
  Synthetic Oligonucleotide
gaagcaauaugauagugaagaaccu

SEQ ID NO: 13014 - RNA, 25 nt, Artificial Sequence
  Synthetic Oligonucleotide
gaagcaauaugauagugaugaaccu

SEQ ID NO: 13015 - RNA, 25 nt, Artificial Sequence
  Synthetic Oligonucleotide
gaagcaauaugauagugaugaacca

SEQ ID NO: 13016 - RNA, 25 nt, Artificial Sequence
  Synthetic Oligonucleotide
gaagcaauaugauagugaugaaccg

SEQ ID NO: 13017 - RNA, 25 nt, Artificial Sequence
  Synthetic Oligonucleotide
gaagcaauaugauagugaugagccu

SEQ ID NO: 13018 - RNA, 25 nt, Artificial Sequence
  Synthetic Oligonucleotide
gaagcaauaugauagugauggaccu

SEQ ID NO: 13019 - RNA, 25 nt, Artificial Sequence
  Synthetic Oligonucleotide
gaagcaauaugauaguaacgaaccu

SEQ ID NO: 13020 - RNA, 25 nt, Artificial Sequence
  Synthetic Oligonucleotide
gaagcaauaugauagcgacgaaccu

SEQ ID NO: 13021 - RNA, 25 nt, Artificial Sequence
  Synthetic Oligonucleotide
gaagcaauaugauaaugacgaaccu

SEQ ID NO: 13022 - RNA, 25 nt, Artificial Sequence
  Synthetic Oligonucleotide
gaagcaauaugacagugacgaaccu

SEQ ID NO: 13023 - RNA, 25 nt, Artificial Sequence
  Synthetic Oligonucleotide
gaagcaauauaauagugacgaaccu

SEQ ID NO: 13024 - RNA, 25 nt, Artificial Sequence
  Synthetic Oligonucleotide
gaagcaauacgauagugacgaaccu

SEQ ID NO: 13025 - RNA, 25 nt, Artificial Sequence
  Synthetic Oligonucleotide
gaagcaguaugauagugacgaaccu

SEQ ID NO: 13026 - RNA, 25 nt, Artificial Sequence
  Synthetic Oligonucleotide
gaagcaguaugauagugacgaaacu

SEQ ID NO: 13027 - RNA, 25 nt, Artificial Sequence
  Synthetic Oligonucleotide
gaaacaauaugauagugacgaaccu

SEQ ID NO: 13028 - RNA, 25 nt, Artificial Sequence
  Synthetic Oligonucleotide
gaggcaauaugauagugacgaaccu

SEQ ID NO: 13029 - RNA, 25 nt, Artificial Sequence
  Synthetic Oligonucleotide
aaagcaauaugauagugacgaaccu

SEQ ID NO: 13030 - RNA, 25 nt, Artificial Sequence
  Synthetic Oligonucleotide
aaagcaauaugauagugacggaccu

SEQ ID NO: 13031 - RNA, 25 nt, Artificial Sequence
  Synthetic Oligonucleotide
gaagcaauaugacagcgacgaaccu

SEQ ID NO: 13032 - RNA, 25 nt, Artificial Sequence
  Synthetic Oligonucleotide
gaagcaauauuauagugaugaacca

SEQ ID NO: 13033 - RNA, 25 nt, Artificial Sequence
  Synthetic Oligonucleotide
uugaagcaauaugauagugacgagc

SEQ ID NO: 13034 - RNA, 25 nt, Artificial Sequence
  Synthetic Oligonucleotide
uugaagcaauaugauagugaagaac

SEQ ID NO: 13035 - RNA, 25 nt, Artificial Sequence
  Synthetic Oligonucleotide
uugaagcaauaugauagugaugaac

SEQ ID NO: 13036 - RNA, 25 nt, Artificial Sequence
  Synthetic Oligonucleotide
uugaagcaauaugauagugaugagc

SEQ ID NO: 13037 - RNA, 25 nt, Artificial Sequence
  Synthetic Oligonucleotide
uugaagcaauaugauagugauggac

SEQ ID NO: 13038 - RNA, 25 nt, Artificial Sequence
  Synthetic Oligonucleotide
uugaagcaauaugauaguaacgaac

SEQ ID NO: 13039 - RNA, 25 nt, Artificial Sequence
  Synthetic Oligonucleotide
uugaagcaauaugauagcgacgaac

SEQ ID NO: 13040 - RNA, 25 nt, Artificial Sequence
  Synthetic Oligonucleotide
uugaagcaauaugauaaugacgaac

SEQ ID NO: 13041 - RNA, 25 nt, Artificial Sequence
  Synthetic Oligonucleotide
uugaagcaauaugacagugacgaac

SEQ ID NO: 13042 - RNA, 25 nt, Artificial Sequence
  Synthetic Oligonucleotide
uugaagcaauauaauagugacgaac

SEQ ID NO: 13043 - RNA, 25 nt, Artificial Sequence
  Synthetic Oligonucleotide
uugaagcaauauuauagugaugaac

SEQ ID NO: 13044 - RNA, 25 nt, Artificial Sequence
  Synthetic Oligonucleotide
uugaagcaauacgauagugacgaac

SEQ ID NO: 13045 - RNA, 25 nt, Artificial Sequence
  Synthetic Oligonucleotide
uugaagcaguaugauagugacgaac

SEQ ID NO: 13046 - RNA, 25 nt, Artificial Sequence
  Synthetic Oligonucleotide
uugaagcaguaugauagugacgaaa

SEQ ID NO: 13047 - RNA, 25 nt, Artificial Sequence
  Synthetic Oligonucleotide
uugaaacaauaugauagugacgaac

SEQ ID NO: 13048 - RNA, 25 nt, Artificial Sequence
  Synthetic Oligonucleotide
uugaggcaauaugauagugacgaac

SEQ ID NO: 13049 - RNA, 25 nt, Artificial Sequence
  Synthetic Oligonucleotide
uuaaagcaauaugauagugacgaac

SEQ ID NO: 13050 - RNA, 25 nt, Artificial Sequence
  Synthetic Oligonucleotide
uuaaagcaauaugauagugacggac

SEQ ID NO: 13051 - RNA, 25 nt, Artificial Sequence
  Synthetic Oligonucleotide
cugaagcaauaugauagugacgaac

SEQ ID NO: 13052 - RNA, 25 nt, Artificial Sequence
  Synthetic Oligonucleotide
cugaagcaauaugauagugaugaac

SEQ ID NO: 13053 - RNA, 25 nt, Artificial Sequence
  Synthetic Oligonucleotide
uugaagcaauaugacagcgacgaac

SEQ ID NO: 13054 - RNA, 25 nt, Artificial Sequence
  Synthetic Oligonucleotide
uuaaagcaguaugacagugaugagc

SEQ ID NO: 13055 - RNA, 25 nt, Artificial Sequence
  Synthetic Oligonucleotide
uuaaaacaauaugacagugaugagc

SEQ ID NO: 13056 - RNA, 25 nt, Artificial Sequence
  Synthetic Oligonucleotide
uuucgucaguccgaaagaggcgaaa

SEQ ID NO: 13057 - RNA, 25 nt, Artificial Sequence
  Synthetic Oligonucleotide
uuucgucaguccgaaagaggcgagg

SEQ ID NO: 13058 - RNA, 25 nt, Artificial Sequence
  Synthetic Oligonucleotide
uuucgucaguccgagagaggcgaag

SEQ ID NO: 13059 - RNA, 25 nt, Artificial Sequence
  Synthetic Oligonucleotide
uuucgucaguccgagagaggagaag

SEQ ID NO: 13060 - RNA, 25 nt, Artificial Sequence
  Synthetic Oligonucleotide
uuucgucagucagaaagaggcgaag

SEQ ID NO: 13061 - RNA, 25 nt, Artificial Sequence
  Synthetic Oligonucleotide
uuucgucagucugaaagaggcgaag

SEQ ID NO: 13062 - RNA, 25 nt, Artificial Sequence
  Synthetic Oligonucleotide
uuucgucaauccgaaagaggcgaag

SEQ ID NO: 13063 - RNA, 25 nt, Artificial Sequence
  Synthetic Oligonucleotide
uuucgucuguccgaaagaggcgaag

SEQ ID NO: 13064 - RNA, 25 nt, Artificial Sequence
  Synthetic Oligonucleotide
uuucgccaguccgaaagaggcgaag

SEQ ID NO: 13065 - RNA, 25 nt, Artificial Sequence
  Synthetic Oligonucleotide
uuucaucaguccgaaagaggcgaag

SEQ ID NO: 13066 - RNA, 25 nt, Artificial Sequence
  Synthetic Oligonucleotide
uuucgucaauccgagagaggcgaag

SEQ ID NO: 13067 - RNA, 25 nt, Artificial Sequence
  Synthetic Oligonucleotide
uuucgucaauccgagagaggcgagg

SEQ ID NO: 13068 - RNA, 25 nt, Artificial Sequence
  Synthetic Oligonucleotide
augugguaaacuuugugaguaugga

SEQ ID NO: 13069 - RNA, 25 nt, Artificial Sequence
  Synthetic Oligonucleotide
augugguaaacuuuguuagcaugga

SEQ ID NO: 13070 - RNA, 25 nt, Artificial Sequence
  Synthetic Oligonucleotide
augugguaaacuuuaugagcaugga

SEQ ID NO: 13071 - RNA, 25 nt, Artificial Sequence
  Synthetic Oligonucleotide
augugguaaacuucgugagcaugga

SEQ ID NO: 13072 - RNA, 25 nt, Artificial Sequence
  Synthetic Oligonucleotide
augugguaaauuuugugagcaugga

SEQ ID NO: 13073 - RNA, 25 nt, Artificial Sequence
  Synthetic Oligonucleotide
augugguaaauuuugugaguaugga

SEQ ID NO: 13074 - RNA, 25 nt, Artificial Sequence
  Synthetic Oligonucleotide
auguggugaacuuugugagcaugga

SEQ ID NO: 13075 - RNA, 25 nt, Artificial Sequence
  Synthetic Oligonucleotide
auguggugaacuuugugaguaugga

SEQ ID NO: 13076 - RNA, 25 nt, Artificial Sequence
  Synthetic Oligonucleotide
auguuguaaacuuugugagcaugga

SEQ ID NO: 13077 - RNA, 25 nt, Artificial Sequence
  Synthetic Oligonucleotide
acgugguaaacuuugugagcaugga

SEQ ID NO: 13078 - RNA, 25 nt, Artificial Sequence
  Synthetic Oligonucleotide
augugguaaauuuuguaaguaugga

SEQ ID NO: 13079 - RNA, 25 nt, Artificial Sequence
  Synthetic Oligonucleotide
augugguaaauuaugugaguaugga

SEQ ID NO: 13080 - RNA, 25 nt, Artificial Sequence
  Synthetic Oligonucleotide
auguaguaaauuuugugagcaugga

SEQ ID NO: 13081 - RNA, 25 nt, Artificial Sequence
  Synthetic Oligonucleotide
acgugguaaauuuugugagcaugga

SEQ ID NO: 13082 - RNA, 25 nt, Artificial Sequence
  Synthetic Oligonucleotide
acgugguaaauuuugugaguaugga

SEQ ID NO: 13083 - RNA, 25 nt, Artificial Sequence
  Synthetic Oligonucleotide
acguggugaacuuugugaguaugga

SEQ ID NO: 13084 - RNA, 25 nt, Artificial Sequence
  Synthetic Oligonucleotide
augugguaaauuauguaaguaugga

SEQ ID NO: 13085 - RNA, 25 nt, Artificial Sequence
  Synthetic Oligonucleotide
acguggugaacuuuguaagcaugga

SEQ ID NO: 13086 - RNA, 25 nt, Artificial Sequence
  Synthetic Oligonucleotide
acgugguuaauuuugugagcaugga

SEQ ID NO: 13087 - RNA, 25 nt, Artificial Sequence
  Synthetic Oligonucleotide
gaugugguaaacuuugugaguaugg

SEQ ID NO: 13088 - RNA, 25 nt, Artificial Sequence
  Synthetic Oligonucleotide
gaugugguaaacuuuguuagcaugg

SEQ ID NO: 13089 - RNA, 25 nt, Artificial Sequence
  Synthetic Oligonucleotide
gaugugguaaacuuuaugagcaugg

SEQ ID NO: 13090 - RNA, 25 nt, Artificial Sequence
  Synthetic Oligonucleotide
gaugugguaaacuucgugagcaugg

SEQ ID NO: 13091 - RNA, 25 nt, Artificial Sequence
  Synthetic Oligonucleotide
gaugugguaaauuuugugagcaugg

SEQ ID NO: 13092 - RNA, 25 nt, Artificial Sequence
  Synthetic Oligonucleotide
gaugugguaaauuuugugaguaugg

SEQ ID NO: 13093 - RNA, 25 nt, Artificial Sequence
  Synthetic Oligonucleotide
gauguggugaacuuugugagcaugg

SEQ ID NO: 13094 - RNA, 25 nt, Artificial Sequence
  Synthetic Oligonucleotide
gauguggugaacuuugugaguaugg

SEQ ID NO: 13095 - RNA, 25 nt, Artificial Sequence
  Synthetic Oligonucleotide
gauguuguaaacuuugugagcaugg

SEQ ID NO: 13096 - RNA, 25 nt, Artificial Sequence
  Synthetic Oligonucleotide
gacgugguaaacuuugugagcaugg

SEQ ID NO: 13097 - RNA, 25 nt, Artificial Sequence
  Synthetic Oligonucleotide
gaugugguaaauuuuguaaguaugg

SEQ ID NO: 13098 - RNA, 25 nt, Artificial Sequence
  Synthetic Oligonucleotide
gaugugguaaauuaugugaguaugg

SEQ ID NO: 13099 - RNA, 25 nt, Artificial Sequence
  Synthetic Oligonucleotide
gauguaguaaauuuugugagcaugg

SEQ ID NO: 13100 - RNA, 25 nt, Artificial Sequence
  Synthetic Oligonucleotide
gacgugguaaauuuugugagcaugg

SEQ ID NO: 13101 - RNA, 25 nt, Artificial Sequence
  Synthetic Oligonucleotide
gacgugguaaauuuugugaguaugg

SEQ ID NO: 13102 - RNA, 25 nt, Artificial Sequence
  Synthetic Oligonucleotide
gacguggugaacuuugugaguaugg

SEQ ID NO: 13103 - RNA, 25 nt, Artificial Sequence
  Synthetic Oligonucleotide
gaugugguaaauuauguaaguaugg

SEQ ID NO: 13104 - RNA, 25 nt, Artificial Sequence
  Synthetic Oligonucleotide
gacguggugaacuuuguaagcaugg

SEQ ID NO: 13105 - RNA, 25 nt, Artificial Sequence
  Synthetic Oligonucleotide
gacgugguuaauuuugugagcaugg

SEQ ID NO: 13106 - RNA, 25 nt, Artificial Sequence
  Synthetic Oligonucleotide
uucgucaguccgaaagaggcgaaaa

SEQ ID NO: 13107 - RNA, 25 nt, Artificial Sequence
  Synthetic Oligonucleotide
uucgucaguccgaaagaggcgagga

SEQ ID NO: 13108 - RNA, 25 nt, Artificial Sequence
  Synthetic Oligonucleotide
uucgucaguccgagagaggcgaaga

SEQ ID NO: 13109 - RNA, 25 nt, Artificial Sequence
  Synthetic Oligonucleotide
uucgucaguccgagagaggagaaga

SEQ ID NO: 13110 - RNA, 25 nt, Artificial Sequence
  Synthetic Oligonucleotide
uucgucagucagaaagaggcgaaga

SEQ ID NO: 13111 - RNA, 25 nt, Artificial Sequence
  Synthetic Oligonucleotide
uucgucagucugaaagaggcgaaga

SEQ ID NO: 13112 - RNA, 25 nt, Artificial Sequence
  Synthetic Oligonucleotide
uucgucaauccgaaagaggcgaaga

SEQ ID NO: 13113 - RNA, 25 nt, Artificial Sequence
  Synthetic Oligonucleotide
uucgucuguccgaaagaggcgaaga

SEQ ID NO: 13114 - RNA, 25 nt, Artificial Sequence
  Synthetic Oligonucleotide
uucgccaguccgaaagaggcgaaga

SEQ ID NO: 13115 - RNA, 25 nt, Artificial Sequence
  Synthetic Oligonucleotide
uucaucaguccgaaagaggcgaaga

SEQ ID NO: 13116 - RNA, 25 nt, Artificial Sequence
  Synthetic Oligonucleotide
uucgucaauccgagagaggcgaaga

SEQ ID NO: 13117 - RNA, 25 nt, Artificial Sequence
  Synthetic Oligonucleotide
uucgucaauccgagagaggcgagga

SEQ ID NO: 13118 - RNA, 25 nt, Artificial Sequence
  Synthetic Oligonucleotide
cuuucgucaguccgaaagaggcgag

SEQ ID NO: 13119 - RNA, 25 nt, Artificial Sequence
  Synthetic Oligonucleotide
cuuucgucaguccgagagaggcgaa

SEQ ID NO: 13120 - RNA, 25 nt, Artificial Sequence
  Synthetic Oligonucleotide
cuuucgucaguccgagagaggagaa

SEQ ID NO: 13121 - RNA, 25 nt, Artificial Sequence
  Synthetic Oligonucleotide
cuuucgucagucagaaagaggcgaa

SEQ ID NO: 13122 - RNA, 25 nt, Artificial Sequence
  Synthetic Oligonucleotide
cuuucgucagucugaaagaggcgaa

SEQ ID NO: 13123 - RNA, 25 nt, Artificial Sequence
  Synthetic Oligonucleotide
cuuucgucaauccgaaagaggcgaa

SEQ ID NO: 13124 - RNA, 25 nt, Artificial Sequence
  Synthetic Oligonucleotide
cuuucgucuguccgaaagaggcgaa

SEQ ID NO: 13125 - RNA, 25 nt, Artificial Sequence
  Synthetic Oligonucleotide
cuuucgccaguccgaaagaggcgaa

SEQ ID NO: 13126 - RNA, 25 nt, Artificial Sequence
  Synthetic Oligonucleotide
cuuucaucaguccgaaagaggcgaa

SEQ ID NO: 13127 - RNA, 25 nt, Artificial Sequence
  Synthetic Oligonucleotide
uuuucgucaguccgaaagaggcgaa

SEQ ID NO: 13128 - RNA, 25 nt, Artificial Sequence
  Synthetic Oligonucleotide
cuuucgucaauccgagagaggcgaa

SEQ ID NO: 13129 - RNA, 25 nt, Artificial Sequence
  Synthetic Oligonucleotide
cuuucgucaauccgagagaggcgag

SEQ ID NO: 13130 - RNA, 25 nt, Artificial Sequence
  Synthetic Oligonucleotide
uuuucgucaguccgagagaggcgaa

SEQ ID NO: 13131 - RNA, 25 nt, Artificial Sequence
  Synthetic Oligonucleotide
uuugaagcaauaugauagugacgag

SEQ ID NO: 13132 - RNA, 25 nt, Artificial Sequence
  Synthetic Oligonucleotide
uuugaagcaauaugauagugaagaa

SEQ ID NO: 13133 - RNA, 25 nt, Artificial Sequence
  Synthetic Oligonucleotide
uuugaagcaauaugauagugaugaa

SEQ ID NO: 13134 - RNA, 25 nt, Artificial Sequence
  Synthetic Oligonucleotide
uuugaagcaauaugauagugaugga

SEQ ID NO: 13135 - RNA, 25 nt, Artificial Sequence
  Synthetic Oligonucleotide
uuugaagcaauaugauaguaacgaa

SEQ ID NO: 13136 - RNA, 25 nt, Artificial Sequence
  Synthetic Oligonucleotide
uuugaagcaauaugauagcgacgaa

SEQ ID NO: 13137 - RNA, 25 nt, Artificial Sequence
  Synthetic Oligonucleotide
uuugaagcaauaugauaaugacgaa

SEQ ID NO: 13138 - RNA, 25 nt, Artificial Sequence
  Synthetic Oligonucleotide
uuugaagcaauaugacagugacgaa

SEQ ID NO: 13139 - RNA, 25 nt, Artificial Sequence
  Synthetic Oligonucleotide
uuugaagcaauauaauagugacgaa

SEQ ID NO: 13140 - RNA, 25 nt, Artificial Sequence
  Synthetic Oligonucleotide
uuugaagcaauauuauagugaugaa

SEQ ID NO: 13141 - RNA, 25 nt, Artificial Sequence
  Synthetic Oligonucleotide
uuugaagcaauacgauagugacgaa

SEQ ID NO: 13142 - RNA, 25 nt, Artificial Sequence
  Synthetic Oligonucleotide
uuugaagcaguaugauagugacgaa

SEQ ID NO: 13143 - RNA, 25 nt, Artificial Sequence
  Synthetic Oligonucleotide
uuugaaacaauaugauagugacgaa

SEQ ID NO: 13144 - RNA, 25 nt, Artificial Sequence
  Synthetic Oligonucleotide
uuugaggcaauaugauagugacgaa

SEQ ID NO: 13145 - RNA, 25 nt, Artificial Sequence
  Synthetic Oligonucleotide
uuuaaagcaauaugauagugacgaa

SEQ ID NO: 13146 - RNA, 25 nt, Artificial Sequence
  Synthetic Oligonucleotide
uuuaaagcaauaugauagugacgga

SEQ ID NO: 13147 - RNA, 25 nt, Artificial Sequence
  Synthetic Oligonucleotide
ucugaagcaauaugauagugacgaa

SEQ ID NO: 13148 - RNA, 25 nt, Artificial Sequence
  Synthetic Oligonucleotide
ucugaagcaauaugauagugaugaa

SEQ ID NO: 13149 - RNA, 25 nt, Artificial Sequence
  Synthetic Oligonucleotide
cuugaagcaauaugauagugacgaa

SEQ ID NO: 13150 - RNA, 25 nt, Artificial Sequence
  Synthetic Oligonucleotide
cuugaagcaauaugauagugaugag

SEQ ID NO: 13151 - RNA, 25 nt, Artificial Sequence
  Synthetic Oligonucleotide
uuugaagcaauaugacagcgacgaa

SEQ ID NO: 13152 - RNA, 25 nt, Artificial Sequence
  Synthetic Oligonucleotide
cuugaagcaauauuauagugaugaa

SEQ ID NO: 13153 - RNA, 25 nt, Artificial Sequence
  Synthetic Oligonucleotide
uuuaaagcaguaugacagugaugag

SEQ ID NO: 13154 - RNA, 25 nt, Artificial Sequence
  Synthetic Oligonucleotide
uuuaaaacaauaugacagugaugag

SEQ ID NO: 13155 - RNA, 25 nt, Artificial Sequence
  Synthetic Oligonucleotide
ggcaagcuuucucaaauguccaaaa

SEQ ID NO: 13156 - RNA, 25 nt, Artificial Sequence
  Synthetic Oligonucleotide
ggcaagcuuucucaaauguccaagg

SEQ ID NO: 13157 - RNA, 25 nt, Artificial Sequence
  Synthetic Oligonucleotide
ggcaagcuuucucaaaugucaaaag

SEQ ID NO: 13158 - RNA, 25 nt, Artificial Sequence
  Synthetic Oligonucleotide
ggcaagcuuucucaaaugucgaaag

SEQ ID NO: 13159 - RNA, 25 nt, Artificial Sequence
  Synthetic Oligonucleotide
ggcaagcuuucucaaauguacaaag

SEQ ID NO: 13160 - RNA, 25 nt, Artificial Sequence
  Synthetic Oligonucleotide
ggcaagcuuucucaaauguucaaag

SEQ ID NO: 13161 - RNA, 25 nt, Artificial Sequence
  Synthetic Oligonucleotide
ggcaagcuuucucagauguccaaag

SEQ ID NO: 13162 - RNA, 25 nt, Artificial Sequence
  Synthetic Oligonucleotide
ggcaagcuuucacaaauguccaaag

SEQ ID NO: 13163 - RNA, 25 nt, Artificial Sequence
  Synthetic Oligonucleotide
ggcaagcuuucacaaauguccaaaa

SEQ ID NO: 13164 - RNA, 25 nt, Artificial Sequence
  Synthetic Oligonucleotide
ggcaagcuuccucaaauguccaaag

SEQ ID NO: 13165 - RNA, 25 nt, Artificial Sequence
  Synthetic Oligonucleotide
ggcaagcugucucaaauguccaaag

SEQ ID NO: 13166 - RNA, 25 nt, Artificial Sequence
  Synthetic Oligonucleotide
ggcaagcugucucaaaugucaaaag

SEQ ID NO: 13167 - RNA, 25 nt, Artificial Sequence
  Synthetic Oligonucleotide
ggcaaacuuucucaaauguccaaag

SEQ ID NO: 13168 - RNA, 25 nt, Artificial Sequence
  Synthetic Oligonucleotide
gguaagcuuucucaaauguccaaag

SEQ ID NO: 13169 - RNA, 25 nt, Artificial Sequence
  Synthetic Oligonucleotide
gguaagcuuucacaaauguccaaag

SEQ ID NO: 13170 - RNA, 25 nt, Artificial Sequence
  Synthetic Oligonucleotide
gcaagcuuucucaaauguccaaagg

SEQ ID NO: 13171 - RNA, 25 nt, Artificial Sequence
  Synthetic Oligonucleotide
gcaagcuuucucaaauguccaaaaa

SEQ ID NO: 13172 - RNA, 25 nt, Artificial Sequence
  Synthetic Oligonucleotide
gcaagcuuucucaaauguccaagga

SEQ ID NO: 13173 - RNA, 25 nt, Artificial Sequence
  Synthetic Oligonucleotide
gcaagcuuucucaaaugucaaaaga

SEQ ID NO: 13174 - RNA, 25 nt, Artificial Sequence
  Synthetic Oligonucleotide
gcaagcuuucucaaaugucgaaaga

SEQ ID NO: 13175 - RNA, 25 nt, Artificial Sequence
  Synthetic Oligonucleotide
gcaagcuuucucaaauguacaaaga

SEQ ID NO: 13176 - RNA, 25 nt, Artificial Sequence
  Synthetic Oligonucleotide
gcaagcuuucucaaauguucaaaga

SEQ ID NO: 13177 - RNA, 25 nt, Artificial Sequence
  Synthetic Oligonucleotide
gcaagcuuucucagauguccaaaga

SEQ ID NO: 13178 - RNA, 25 nt, Artificial Sequence
  Synthetic Oligonucleotide
gcaagcuuucacaaauguccaaaga

SEQ ID NO: 13179 - RNA, 25 nt, Artificial Sequence
  Synthetic Oligonucleotide
gcaagcuuucacaaauguccaaaaa

SEQ ID NO: 13180 - RNA, 25 nt, Artificial Sequence
  Synthetic Oligonucleotide
gcaagcuuccucaaauguccaaaga

SEQ ID NO: 13181 - RNA, 25 nt, Artificial Sequence
  Synthetic Oligonucleotide
gcaagcugucucaaauguccaaaga

SEQ ID NO: 13182 - RNA, 25 nt, Artificial Sequence
  Synthetic Oligonucleotide
gcaagcugucucaaaugucaaaaga

SEQ ID NO: 13183 - RNA, 25 nt, Artificial Sequence
  Synthetic Oligonucleotide
gcaaacuuucucaaauguccaaaga

SEQ ID NO: 13184 - RNA, 25 nt, Artificial Sequence
  Synthetic Oligonucleotide
guaagcuuucucaaauguccaaaga

SEQ ID NO: 13185 - RNA, 25 nt, Artificial Sequence
  Synthetic Oligonucleotide
guaagcuuucacaaauguccaaaga

SEQ ID NO: 13186 - RNA, 25 nt, Artificial Sequence
  Synthetic Oligonucleotide
aagcuuucucaaauguccaaagagg

SEQ ID NO: 13187 - RNA, 25 nt, Artificial Sequence
  Synthetic Oligonucleotide
aagcuuucucaaauguccaaaggag

SEQ ID NO: 13188 - RNA, 25 nt, Artificial Sequence
  Synthetic Oligonucleotide
aagcuuucucaaauguccaaaaaag

SEQ ID NO: 13189 - RNA, 25 nt, Artificial Sequence
  Synthetic Oligonucleotide
aagcuuucucaaauguccaaaaagg

SEQ ID NO: 13190 - RNA, 25 nt, Artificial Sequence
  Synthetic Oligonucleotide
aagcuuucucaaauguccaaggaag

SEQ ID NO: 13191 - RNA, 25 nt, Artificial Sequence
  Synthetic Oligonucleotide
aagcuuucucaaaugucaaaagaag

SEQ ID NO: 13192 - RNA, 25 nt, Artificial Sequence
  Synthetic Oligonucleotide
aagcuuucucaaaugucgaaagaag

SEQ ID NO: 13193 - RNA, 25 nt, Artificial Sequence
  Synthetic Oligonucleotide
aagcuuucucaaauguacaaagaag

SEQ ID NO: 13194 - RNA, 25 nt, Artificial Sequence
  Synthetic Oligonucleotide
aagcuuucucaaauguucaaagaag

SEQ ID NO: 13195 - RNA, 25 nt, Artificial Sequence
  Synthetic Oligonucleotide
aagcuuucucagauguccaaagaag

SEQ ID NO: 13196 - RNA, 25 nt, Artificial Sequence
  Synthetic Oligonucleotide
aagcuuucacaaauguccaaagaag

SEQ ID NO: 13197 - RNA, 25 nt, Artificial Sequence
  Synthetic Oligonucleotide
aagcuuucacaaauguccaaaaaag

SEQ ID NO: 13198 - RNA, 25 nt, Artificial Sequence
  Synthetic Oligonucleotide
aagcuuccucaaauguccaaagaag

SEQ ID NO: 13199 - RNA, 25 nt, Artificial Sequence
  Synthetic Oligonucleotide
aagcugucucaaauguccaaagaag

SEQ ID NO: 13200 - RNA, 25 nt, Artificial Sequence
  Synthetic Oligonucleotide
aaacuuucucaaauguccaaagaag

SEQ ID NO: 13201 - RNA, 25 nt, Artificial Sequence
  Synthetic Oligonucleotide
aagcugucucaaaugucaaaagaag

SEQ ID NO: 13202 - RNA, 25 nt, Artificial Sequence
  Synthetic Oligonucleotide
agcuuucucaaauguccaaagaggu

SEQ ID NO: 13203 - RNA, 25 nt, Artificial Sequence
  Synthetic Oligonucleotide
agcuuucucaaauguccaaaggagu

SEQ ID NO: 13204 - RNA, 25 nt, Artificial Sequence
  Synthetic Oligonucleotide
agcuuucucaaauguccaaaaaagu

SEQ ID NO: 13205 - RNA, 25 nt, Artificial Sequence
  Synthetic Oligonucleotide
agcuuucucaaauguccaaaaaggu

SEQ ID NO: 13206 - RNA, 25 nt, Artificial Sequence
  Synthetic Oligonucleotide
agcuuucucaaauguccaaggaagu

SEQ ID NO: 13207 - RNA, 25 nt, Artificial Sequence
  Synthetic Oligonucleotide
agcuuucucaaaugucaaaagaagu

SEQ ID NO: 13208 - RNA, 25 nt, Artificial Sequence
  Synthetic Oligonucleotide
agcuuucucaaaugucgaaagaagu

SEQ ID NO: 13209 - RNA, 25 nt, Artificial Sequence
  Synthetic Oligonucleotide
agcuuucucaaauguacaaagaagu

SEQ ID NO: 13210 - RNA, 25 nt, Artificial Sequence
  Synthetic Oligonucleotide
agcuuucucaaauguucaaagaagu

SEQ ID NO: 13211 - RNA, 25 nt, Artificial Sequence
  Synthetic Oligonucleotide
agcuuucucagauguccaaagaagu

SEQ ID NO: 13212 - RNA, 25 nt, Artificial Sequence
  Synthetic Oligonucleotide
agcuuucacaaauguccaaagaagu

SEQ ID NO: 13213 - RNA, 25 nt, Artificial Sequence
  Synthetic Oligonucleotide
agcuuucacaaauguccaaaaaagu

SEQ ID NO: 13214 - RNA, 25 nt, Artificial Sequence
  Synthetic Oligonucleotide
agcuuccucaaauguccaaagaagu

SEQ ID NO: 13215 - RNA, 25 nt, Artificial Sequence
  Synthetic Oligonucleotide
agcugucucaaauguccaaagaagu

SEQ ID NO: 13216 - RNA, 25 nt, Artificial Sequence
  Synthetic Oligonucleotide
aacuuucucaaauguccaaagaagu

SEQ ID NO: 13217 - RNA, 25 nt, Artificial Sequence
  Synthetic Oligonucleotide
agcugucucaaaugucaaaagaagu

SEQ ID NO: 13218 - RNA, 25 nt, Artificial Sequence
  Synthetic Oligonucleotide
caagcuuucucaaauguccaaagag

SEQ ID NO: 13219 - RNA, 25 nt, Artificial Sequence
  Synthetic Oligonucleotide
caagcuuucucaaauguccaaagga

SEQ ID NO: 13220 - RNA, 25 nt, Artificial Sequence
  Synthetic Oligonucleotide
caagcuuucucaaauguccaaaaaa

SEQ ID NO: 13221 - RNA, 25 nt, Artificial Sequence
  Synthetic Oligonucleotide
caagcuuucucaaauguccaaaaag

SEQ ID NO: 13222 - RNA, 25 nt, Artificial Sequence
  Synthetic Oligonucleotide
caagcuuucucaaauguccaaggaa

SEQ ID NO: 13223 - RNA, 25 nt, Artificial Sequence
  Synthetic Oligonucleotide
caagcuuucucaaaugucaaaagaa

SEQ ID NO: 13224 - RNA, 25 nt, Artificial Sequence
  Synthetic Oligonucleotide
caagcuuucucaaaugucgaaagaa

SEQ ID NO: 13225 - RNA, 25 nt, Artificial Sequence
  Synthetic Oligonucleotide
caagcuuucucaaauguacaaagaa

SEQ ID NO: 13226 - RNA, 25 nt, Artificial Sequence
  Synthetic Oligonucleotide
caagcuuucucaaauguucaaagaa

SEQ ID NO: 13227 - RNA, 25 nt, Artificial Sequence
  Synthetic Oligonucleotide
caagcuuucucagauguccaaagaa

SEQ ID NO: 13228 - RNA, 25 nt, Artificial Sequence
  Synthetic Oligonucleotide
caagcuuucacaaauguccaaagaa

SEQ ID NO: 13229 - RNA, 25 nt, Artificial Sequence
  Synthetic Oligonucleotide
caagcuuucacaaauguccaaaaaa

SEQ ID NO: 13230 - RNA, 25 nt, Artificial Sequence
  Synthetic Oligonucleotide
caagcuuccucaaauguccaaagaa

SEQ ID NO: 13231 - RNA, 25 nt, Artificial Sequence
  Synthetic Oligonucleotide
caagcugucucaaauguccaaagaa

SEQ ID NO: 13232 - RNA, 25 nt, Artificial Sequence
  Synthetic Oligonucleotide
caaacuuucucaaauguccaaagaa

SEQ ID NO: 13233 - RNA, 25 nt, Artificial Sequence
  Synthetic Oligonucleotide
uaagcuuucucaaauguccaaagaa

SEQ ID NO: 13234 - RNA, 25 nt, Artificial Sequence
  Synthetic Oligonucleotide
caagcugucucaaaugucaaaagaa

SEQ ID NO: 13235 - RNA, 25 nt, Artificial Sequence
  Synthetic Oligonucleotide
uaagcuuucacaaauguccaaagaa

SEQ ID NO: 13236 - RNA, 25 nt, Artificial Sequence
  Synthetic Oligonucleotide
ucuuauuucuucggagacagugcag

SEQ ID NO: 13237 - RNA, 25 nt, Artificial Sequence
  Synthetic Oligonucleotide
ucuuauuucuucggagacaaugcaa

SEQ ID NO: 13238 - RNA, 25 nt, Artificial Sequence
  Synthetic Oligonucleotide
ucuuauuucuucggagacaaugcug

SEQ ID NO: 13239 - RNA, 25 nt, Artificial Sequence
  Synthetic Oligonucleotide
ucuuauuucuucggagauaaugcag

SEQ ID NO: 13240 - RNA, 25 nt, Artificial Sequence
  Synthetic Oligonucleotide
ucuuauuucuucggggacaaugcag

SEQ ID NO: 13241 - RNA, 25 nt, Artificial Sequence
  Synthetic Oligonucleotide
ucuuauuucuuuggagacaaugcag

SEQ ID NO: 13242 - RNA, 25 nt, Artificial Sequence
  Synthetic Oligonucleotide
ucuuauuucuucggggauaaugcag

SEQ ID NO: 13243 - RNA, 25 nt, Artificial Sequence
  Synthetic Oligonucleotide
cuuauuucuucggagacaaugcaaa

SEQ ID NO: 13244 - RNA, 25 nt, Artificial Sequence
  Synthetic Oligonucleotide
cuuauuucuucggagacaaugcuga

SEQ ID NO: 13245 - RNA, 25 nt, Artificial Sequence
  Synthetic Oligonucleotide
cuuauuucuucggagacagugcaga

SEQ ID NO: 13246 - RNA, 25 nt, Artificial Sequence
  Synthetic Oligonucleotide
cuuauuucuucggagauaaugcaga

SEQ ID NO: 13247 - RNA, 25 nt, Artificial Sequence
  Synthetic Oligonucleotide
cuuauuucuucggggacaaugcaga

SEQ ID NO: 13248 - RNA, 25 nt, Artificial Sequence
  Synthetic Oligonucleotide
cuuauuucuuuggagacaaugcaga

SEQ ID NO: 13249 - RNA, 25 nt, Artificial Sequence
  Synthetic Oligonucleotide
cuuauuucuucggggauaaugcaga

SEQ ID NO: 13250 - RNA, 25 nt, Artificial Sequence
  Synthetic Oligonucleotide
uaaugaaggaucuuauuucuucggg

SEQ ID NO: 13251 - RNA, 25 nt, Artificial Sequence
  Synthetic Oligonucleotide
uaaugaaggaucuuauuucuuugga

SEQ ID NO: 13252 - RNA, 25 nt, Artificial Sequence
  Synthetic Oligonucleotide
uaaugaagggucuuauuucuucgga

SEQ ID NO: 13253 - RNA, 25 nt, Artificial Sequence
  Synthetic Oligonucleotide
uaaugagggaucuuauuucuucgga

SEQ ID NO: 13254 - RNA, 25 nt, Artificial Sequence
  Synthetic Oligonucleotide
uaaugaagguucuuauuucuucgga

SEQ ID NO: 13255 - RNA, 25 nt, Artificial Sequence
  Synthetic Oligonucleotide
uaaugaaagaucuuauuucuucgga

SEQ ID NO: 13256 - RNA, 25 nt, Artificial Sequence
  Synthetic Oligonucleotide
uaacgaaggaucuuauuucuucgga

SEQ ID NO: 13257 - RNA, 25 nt, Artificial Sequence
  Synthetic Oligonucleotide
caaugaaggaucuuauuucuucgga

SEQ ID NO: 13258 - RNA, 25 nt, Artificial Sequence
  Synthetic Oligonucleotide
uaaugaggggucuuauuucuucgga

SEQ ID NO: 13259 - RNA, 25 nt, Artificial Sequence
  Synthetic Oligonucleotide
uaaugaaaguucuuauuucuucgga

SEQ ID NO: 13260 - RNA, 25 nt, Artificial Sequence
  Synthetic Oligonucleotide
uaaugaaggaucuuauucucggaga

SEQ ID NO: 13261 - RNA, 25 nt, Artificial Sequence
  Synthetic Oligonucleotide
uuaugaggggucuuauuucuucgga

SEQ ID NO: 13262 - RNA, 25 nt, Artificial Sequence
  Synthetic Oligonucleotide
augaaggaucuuauuucuucgggga

SEQ ID NO: 13263 - RNA, 25 nt, Artificial Sequence
  Synthetic Oligonucleotide
augaaggaucuuauuucuuuggaga

SEQ ID NO: 13264 - RNA, 25 nt, Artificial Sequence
  Synthetic Oligonucleotide
augaagggucuuauuucuucggaga

SEQ ID NO: 13265 - RNA, 25 nt, Artificial Sequence
  Synthetic Oligonucleotide
augagggaucuuauuucuucggaga

SEQ ID NO: 13266 - RNA, 25 nt, Artificial Sequence
  Synthetic Oligonucleotide
augaagguucuuauuucuucggaga

SEQ ID NO: 13267 - RNA, 25 nt, Artificial Sequence
  Synthetic Oligonucleotide
augaaagaucuuauuucuucggaga

SEQ ID NO: 13268 - RNA, 25 nt, Artificial Sequence
  Synthetic Oligonucleotide
acgaaggaucuuauuucuucggaga

SEQ ID NO: 13269 - RNA, 25 nt, Artificial Sequence
  Synthetic Oligonucleotide
augaggggucuuauuucuucggaga

SEQ ID NO: 13270 - RNA, 25 nt, Artificial Sequence
  Synthetic Oligonucleotide
augaaaguucuuauuucuucggaga

SEQ ID NO: 13271 - RNA, 25 nt, Artificial Sequence
  Synthetic Oligonucleotide
aaugaaggaucuuauuucuucgggg

SEQ ID NO: 13272 - RNA, 25 nt, Artificial Sequence
  Synthetic Oligonucleotide
aaugaaggaucuuauuucuuuggag

SEQ ID NO: 13273 - RNA, 25 nt, Artificial Sequence
  Synthetic Oligonucleotide
aaugaaggaucuuauuucuucggaa

SEQ ID NO: 13274 - RNA, 25 nt, Artificial Sequence
  Synthetic Oligonucleotide
aaugaagggucuuauuucuucggag

SEQ ID NO: 13275 - RNA, 25 nt, Artificial Sequence
  Synthetic Oligonucleotide
aaugagggaucuuauuucuucggag

SEQ ID NO: 13276 - RNA, 25 nt, Artificial Sequence
  Synthetic Oligonucleotide
aaugaagguucuuauuucuucggag

SEQ ID NO: 13277 - RNA, 25 nt, Artificial Sequence
  Synthetic Oligonucleotide
aaugaaagaucuuauuucuucggag

SEQ ID NO: 13278 - RNA, 25 nt, Artificial Sequence
  Synthetic Oligonucleotide
aacgaaggaucuuauuucuucggag

SEQ ID NO: 13279 - RNA, 25 nt, Artificial Sequence
  Synthetic Oligonucleotide
aaugaggggucuuauuucuucggag

SEQ ID NO: 13280 - RNA, 25 nt, Artificial Sequence
  Synthetic Oligonucleotide
aaugaaaguucuuauuucuucggag

SEQ ID NO: 13281 - RNA, 25 nt, Artificial Sequence
  Synthetic Oligonucleotide
uaugaggggucuuauuucuucggag

SEQ ID NO: 13282 - RNA, 25 nt, Artificial Sequence
  Synthetic Oligonucleotide
aaugaaggaucuuauucucggagaa

SEQ ID NO: 13283 - RNA, 25 nt, Artificial Sequence
  Synthetic Oligonucleotide
gaaggaucuuauuucuucggagaua

SEQ ID NO: 13284 - RNA, 25 nt, Artificial Sequence
  Synthetic Oligonucleotide
gaaggaucuuauuucuucggggaca

SEQ ID NO: 13285 - RNA, 25 nt, Artificial Sequence
  Synthetic Oligonucleotide
gaaggaucuuauuucuucggggaua

SEQ ID NO: 13286 - RNA, 25 nt, Artificial Sequence
  Synthetic Oligonucleotide
gaaggaucuuauuucuuuggagaca

SEQ ID NO: 13287 - RNA, 25 nt, Artificial Sequence
  Synthetic Oligonucleotide
gaagggucuuauuucuucggagaca

SEQ ID NO: 13288 - RNA, 25 nt, Artificial Sequence
  Synthetic Oligonucleotide
gagggaucuuauuucuucggagaca

SEQ ID NO: 13289 - RNA, 25 nt, Artificial Sequence
  Synthetic Oligonucleotide
gaagguucuuauuucuucggagaca

SEQ ID NO: 13290 - RNA, 25 nt, Artificial Sequence
  Synthetic Oligonucleotide
gaaagaucuuauuucuucggagaca

SEQ ID NO: 13291 - RNA, 25 nt, Artificial Sequence
  Synthetic Oligonucleotide
gaggggucuuauuucuucggagaca

SEQ ID NO: 13292 - RNA, 25 nt, Artificial Sequence
  Synthetic Oligonucleotide
gaaaguucuuauuucuucggagaca

SEQ ID NO: 13293 - RNA, 25 nt, Artificial Sequence
  Synthetic Oligonucleotide
gaucuuauuucuucggagacagugc

SEQ ID NO: 13294 - RNA, 25 nt, Artificial Sequence
  Synthetic Oligonucleotide
gaucuuauuucuucggagauaaugc

SEQ ID NO: 13295 - RNA, 25 nt, Artificial Sequence
  Synthetic Oligonucleotide
gaucuuauuucuucggggacaaugc

SEQ ID NO: 13296 - RNA, 25 nt, Artificial Sequence
  Synthetic Oligonucleotide
gaucuuauuucuuuggagacaaugc

SEQ ID NO: 13297 - RNA, 25 nt, Artificial Sequence
  Synthetic Oligonucleotide
ggucuuauuucuucggagacaaugc

SEQ ID NO: 13298 - RNA, 25 nt, Artificial Sequence
  Synthetic Oligonucleotide
gaucuuauuucuucggggauaaugc

SEQ ID NO: 13299 - RNA, 25 nt, Artificial Sequence
  Synthetic Oligonucleotide
guucuuauuucuucggagacaaugc

SEQ ID NO: 13300 - RNA, 25 nt, Artificial Sequence
  Synthetic Oligonucleotide
aaggaucuuauuucuucggagacag

SEQ ID NO: 13301 - RNA, 25 nt, Artificial Sequence
  Synthetic Oligonucleotide
aaggaucuuauuucuucggagauaa

SEQ ID NO: 13302 - RNA, 25 nt, Artificial Sequence
  Synthetic Oligonucleotide
aaggaucuuauuucuucggggacaa

SEQ ID NO: 13303 - RNA, 25 nt, Artificial Sequence
  Synthetic Oligonucleotide
aaggaucuuauuucuucggggauaa

SEQ ID NO: 13304 - RNA, 25 nt, Artificial Sequence
  Synthetic Oligonucleotide
aaggaucuuauuucuuuggagacaa

SEQ ID NO: 13305 - RNA, 25 nt, Artificial Sequence
  Synthetic Oligonucleotide
aagggucuuauuucuucggagacaa

SEQ ID NO: 13306 - RNA, 25 nt, Artificial Sequence
  Synthetic Oligonucleotide
agggaucuuauuucuucggagacaa

SEQ ID NO: 13307 - RNA, 25 nt, Artificial Sequence
  Synthetic Oligonucleotide
agggaucuuauuucuucggagacag

SEQ ID NO: 13308 - RNA, 25 nt, Artificial Sequence
  Synthetic Oligonucleotide
aagguucuuauuucuucggagacaa

SEQ ID NO: 13309 - RNA, 25 nt, Artificial Sequence
  Synthetic Oligonucleotide
aaagaucuuauuucuucggagacaa

SEQ ID NO: 13310 - RNA, 25 nt, Artificial Sequence
  Synthetic Oligonucleotide
aggggucuuauuucuucggagacaa

SEQ ID NO: 13311 - RNA, 25 nt, Artificial Sequence
  Synthetic Oligonucleotide
aaaguucuuauuucuucggagacaa

SEQ ID NO: 13312 - RNA, 25 nt, Artificial Sequence
  Synthetic Oligonucleotide
ggaucuuauuucuucggagacagug

SEQ ID NO: 13313 - RNA, 25 nt, Artificial Sequence
  Synthetic Oligonucleotide
ggaucuuauuucuucggagauaaug

SEQ ID NO: 13314 - RNA, 25 nt, Artificial Sequence
  Synthetic Oligonucleotide
ggaucuuauuucuucggggacaaug

SEQ ID NO: 13315 - RNA, 25 nt, Artificial Sequence
  Synthetic Oligonucleotide
ggaucuuauuucuuuggagacaaug

SEQ ID NO: 13316 - RNA, 25 nt, Artificial Sequence
  Synthetic Oligonucleotide
gggucuuauuucuucggagacaaug

SEQ ID NO: 13317 - RNA, 25 nt, Artificial Sequence
  Synthetic Oligonucleotide
ggaucuuauuucuucggggauaaug

SEQ ID NO: 13318 - RNA, 25 nt, Artificial Sequence
  Synthetic Oligonucleotide
gguucuuauuucuucggagacaaug

SEQ ID NO: 13319 - RNA, 25 nt, Artificial Sequence
  Synthetic Oligonucleotide
agaucuuauuucuucggagacaaug

SEQ ID NO: 13320 - RNA, 25 nt, Artificial Sequence
  Synthetic Oligonucleotide
aguucuuauuucuucggagacaaug

SEQ ID NO: 13321 - RNA, 25 nt, Artificial Sequence
  Synthetic Oligonucleotide
aggaucuuauuucuucggagacagu

SEQ ID NO: 13322 - RNA, 25 nt, Artificial Sequence
  Synthetic Oligonucleotide
aggaucuuauuucuucggagauaau

SEQ ID NO: 13323 - RNA, 25 nt, Artificial Sequence
  Synthetic Oligonucleotide
aggaucuuauuucuucggggacaau

SEQ ID NO: 13324 - RNA, 25 nt, Artificial Sequence
  Synthetic Oligonucleotide
aggaucuuauuucuuuggagacaau

SEQ ID NO: 13325 - RNA, 25 nt, Artificial Sequence
  Synthetic Oligonucleotide
agggucuuauuucuucggagacaau

SEQ ID NO: 13326 - RNA, 25 nt, Artificial Sequence
  Synthetic Oligonucleotide
gggaucuuauuucuucggagacaau

SEQ ID NO: 13327 - RNA, 25 nt, Artificial Sequence
  Synthetic Oligonucleotide
aggaucuuauuucuucggggauaau

SEQ ID NO: 13328 - RNA, 25 nt, Artificial Sequence
  Synthetic Oligonucleotide
gggaucuuauuucuucggagacagu

SEQ ID NO: 13329 - RNA, 25 nt, Artificial Sequence
  Synthetic Oligonucleotide
agguucuuauuucuucggagacaau

SEQ ID NO: 13330 - RNA, 25 nt, Artificial Sequence
  Synthetic Oligonucleotide
aagaucuuauuucuucggagacaau

SEQ ID NO: 13331 - RNA, 25 nt, Artificial Sequence
  Synthetic Oligonucleotide
ggggucuuauuucuucggagacaau

SEQ ID NO: 13332 - RNA, 25 nt, Artificial Sequence
  Synthetic Oligonucleotide
aaguucuuauuucuucggagacaau

SEQ ID NO: 13333 - RNA, 25 nt, Artificial Sequence
  Synthetic Oligonucleotide
ugaaggaucuuauuucuucggagau

SEQ ID NO: 13334 - RNA, 25 nt, Artificial Sequence
  Synthetic Oligonucleotide
ugaaggaucuuauuucuucggggac

SEQ ID NO: 13335 - RNA, 25 nt, Artificial Sequence
  Synthetic Oligonucleotide
ugaaggaucuuauuucuucggggau

SEQ ID NO: 13336 - RNA, 25 nt, Artificial Sequence
  Synthetic Oligonucleotide
ugaaggaucuuauuucuuuggagac

SEQ ID NO: 13337 - RNA, 25 nt, Artificial Sequence
  Synthetic Oligonucleotide
ugaagggucuuauuucuucggagac

SEQ ID NO: 13338 - RNA, 25 nt, Artificial Sequence
  Synthetic Oligonucleotide
ugagggaucuuauuucuucggagac

SEQ ID NO: 13339 - RNA, 25 nt, Artificial Sequence
  Synthetic Oligonucleotide
ugaagguucuuauuucuucggagac

SEQ ID NO: 13340 - RNA, 25 nt, Artificial Sequence
  Synthetic Oligonucleotide
ugaaagaucuuauuucuucggagac

SEQ ID NO: 13341 - RNA, 25 nt, Artificial Sequence
  Synthetic Oligonucleotide
cgaaggaucuuauuucuucggagac

SEQ ID NO: 13342 - RNA, 25 nt, Artificial Sequence
  Synthetic Oligonucleotide
ugaggggucuuauuucuucggagac

SEQ ID NO: 13343 - RNA, 25 nt, Artificial Sequence
  Synthetic Oligonucleotide
ugaaaguucuuauuucuucggagac

SEQ ID NO: 13344 - RNA, 25 nt, Artificial Sequence
  Synthetic Oligonucleotide
aucuuauuucuucggagacagugca

SEQ ID NO: 13345 - RNA, 25 nt, Artificial Sequence
  Synthetic Oligonucleotide
aucuuauuucuucggagacaaugcu

SEQ ID NO: 13346 - RNA, 25 nt, Artificial Sequence
  Synthetic Oligonucleotide
aucuuauuucuucggagauaaugca

SEQ ID NO: 13347 - RNA, 25 nt, Artificial Sequence
  Synthetic Oligonucleotide
aucuuauuucuucggggacaaugca

SEQ ID NO: 13348 - RNA, 25 nt, Artificial Sequence
  Synthetic Oligonucleotide
aucuuauuucuuuggagacaaugca

SEQ ID NO: 13349 - RNA, 25 nt, Artificial Sequence
  Synthetic Oligonucleotide
gucuuauuucuucggagacaaugca

SEQ ID NO: 13350 - RNA, 25 nt, Artificial Sequence
  Synthetic Oligonucleotide
uucuuauuucuucggagacaaugca

SEQ ID NO: 13351 - RNA, 25 nt, Artificial Sequence
  Synthetic Oligonucleotide
aucuuauuucuucggggauaaugca

SEQ ID NO: 13352 - RNA, 25 nt, Artificial Sequence
  Synthetic Oligonucleotide
ugaguaaugaagggucuuauuucuu

SEQ ID NO: 13353 - RNA, 25 nt, Artificial Sequence
  Synthetic Oligonucleotide
ugaguaaugagggaucuuauuucuu

SEQ ID NO: 13354 - RNA, 25 nt, Artificial Sequence
  Synthetic Oligonucleotide
ugaguaaugaagguucuuauuucuu

SEQ ID NO: 13355 - RNA, 25 nt, Artificial Sequence
  Synthetic Oligonucleotide
ugaguaaugaaagaucuuauuucuu

SEQ ID NO: 13356 - RNA, 25 nt, Artificial Sequence
  Synthetic Oligonucleotide
ugaguaacgaaggaucuuauuucuu

SEQ ID NO: 13357 - RNA, 25 nt, Artificial Sequence
  Synthetic Oligonucleotide
ugagcaaugaaggaucuuauuucuu

SEQ ID NO: 13358 - RNA, 25 nt, Artificial Sequence
  Synthetic Oligonucleotide
ugaauaaugaaggaucuuauuucuu

SEQ ID NO: 13359 - RNA, 25 nt, Artificial Sequence
  Synthetic Oligonucleotide
uaaguaaugaaggaucuuauuucuu

SEQ ID NO: 13360 - RNA, 25 nt, Artificial Sequence
  Synthetic Oligonucleotide
ugaauaaugaaggaucuuauucucg

SEQ ID NO: 13361 - RNA, 25 nt, Artificial Sequence
  Synthetic Oligonucleotide
ugaauaaugaagggucuuauuucuu

SEQ ID NO: 13362 - RNA, 25 nt, Artificial Sequence
  Synthetic Oligonucleotide
ugaguaaugaaaguucuuauuucuu

SEQ ID NO: 13363 - RNA, 25 nt, Artificial Sequence
  Synthetic Oligonucleotide
ugaauaaugaggggucuuauuucuu

SEQ ID NO: 13364 - RNA, 25 nt, Artificial Sequence
  Synthetic Oligonucleotide
augaguaaugaagggucuuauuucu

SEQ ID NO: 13365 - RNA, 25 nt, Artificial Sequence
  Synthetic Oligonucleotide
augaguaaugagggaucuuauuucu

SEQ ID NO: 13366 - RNA, 25 nt, Artificial Sequence
  Synthetic Oligonucleotide
augaguaaugaagguucuuauuucu

SEQ ID NO: 13367 - RNA, 25 nt, Artificial Sequence
  Synthetic Oligonucleotide
augaguaaugaaagaucuuauuucu

SEQ ID NO: 13368 - RNA, 25 nt, Artificial Sequence
  Synthetic Oligonucleotide
augaguaacgaaggaucuuauuucu

SEQ ID NO: 13369 - RNA, 25 nt, Artificial Sequence
  Synthetic Oligonucleotide
augagcaaugaaggaucuuauuucu

SEQ ID NO: 13370 - RNA, 25 nt, Artificial Sequence
  Synthetic Oligonucleotide
augaauaaugaaggaucuuauuucu

SEQ ID NO: 13371 - RNA, 25 nt, Artificial Sequence
  Synthetic Oligonucleotide
auaaguaaugaaggaucuuauuucu

SEQ ID NO: 13372 - RNA, 25 nt, Artificial Sequence
  Synthetic Oligonucleotide
augaauaaugaaggaucuuauucuc

SEQ ID NO: 13373 - RNA, 25 nt, Artificial Sequence
  Synthetic Oligonucleotide
augaauaaugaagggucuuauuucu

SEQ ID NO: 13374 - RNA, 25 nt, Artificial Sequence
  Synthetic Oligonucleotide
augaguaaugaaaguucuuauuucu

SEQ ID NO: 13375 - RNA, 25 nt, Artificial Sequence
  Synthetic Oligonucleotide
augaauaaugaggggucuuauuucu

SEQ ID NO: 13376 - RNA, 25 nt, Artificial Sequence
  Synthetic Oligonucleotide
aguaaugaaggaucuuauuucuuug

SEQ ID NO: 13377 - RNA, 25 nt, Artificial Sequence
  Synthetic Oligonucleotide
aguaaugaagggucuuauuucuucg

SEQ ID NO: 13378 - RNA, 25 nt, Artificial Sequence
  Synthetic Oligonucleotide
aguaaugagggaucuuauuucuucg

SEQ ID NO: 13379 - RNA, 25 nt, Artificial Sequence
  Synthetic Oligonucleotide
aguaaugaagguucuuauuucuucg

SEQ ID NO: 13380 - RNA, 25 nt, Artificial Sequence
  Synthetic Oligonucleotide
aguaaugaaagaucuuauuucuucg

SEQ ID NO: 13381 - RNA, 25 nt, Artificial Sequence
  Synthetic Oligonucleotide
aguaacgaaggaucuuauuucuucg

SEQ ID NO: 13382 - RNA, 25 nt, Artificial Sequence
  Synthetic Oligonucleotide
agcaaugaaggaucuuauuucuucg

SEQ ID NO: 13383 - RNA, 25 nt, Artificial Sequence
  Synthetic Oligonucleotide
aauaaugaaggaucuuauuucuucg

SEQ ID NO: 13384 - RNA, 25 nt, Artificial Sequence
  Synthetic Oligonucleotide
aauaaugaaggaucuuauucucgga

SEQ ID NO: 13385 - RNA, 25 nt, Artificial Sequence
  Synthetic Oligonucleotide
aauaaugaagggucuuauuucuucg

SEQ ID NO: 13386 - RNA, 25 nt, Artificial Sequence
  Synthetic Oligonucleotide
aguaaugaaaguucuuauuucuucg

SEQ ID NO: 13387 - RNA, 25 nt, Artificial Sequence
  Synthetic Oligonucleotide
aauaaugaggggucuuauuucuucg

SEQ ID NO: 13388 - RNA, 25 nt, Artificial Sequence
  Synthetic Oligonucleotide
gaguaaugaaggaucuuauuucuuu

SEQ ID NO: 13389 - RNA, 25 nt, Artificial Sequence
  Synthetic Oligonucleotide
gaguaaugaagggucuuauuucuuc

SEQ ID NO: 13390 - RNA, 25 nt, Artificial Sequence
  Synthetic Oligonucleotide
gaguaaugagggaucuuauuucuuc

SEQ ID NO: 13391 - RNA, 25 nt, Artificial Sequence
  Synthetic Oligonucleotide
gaguaaugaagguucuuauuucuuc

SEQ ID NO: 13392 - RNA, 25 nt, Artificial Sequence
  Synthetic Oligonucleotide
gaguaaugaaagaucuuauuucuuc

SEQ ID NO: 13393 - RNA, 25 nt, Artificial Sequence
  Synthetic Oligonucleotide
gaguaacgaaggaucuuauuucuuc

SEQ ID NO: 13394 - RNA, 25 nt, Artificial Sequence
  Synthetic Oligonucleotide
gagcaaugaaggaucuuauuucuuc

SEQ ID NO: 13395 - RNA, 25 nt, Artificial Sequence
  Synthetic Oligonucleotide
gaauaaugaaggaucuuauuucuuc

SEQ ID NO: 13396 - RNA, 25 nt, Artificial Sequence
  Synthetic Oligonucleotide
aaguaaugaaggaucuuauuucuuc

SEQ ID NO: 13397 - RNA, 25 nt, Artificial Sequence
  Synthetic Oligonucleotide
gaauaaugaaggaucuuauucucgg

SEQ ID NO: 13398 - RNA, 25 nt, Artificial Sequence
  Synthetic Oligonucleotide
gaauaaugaagggucuuauuucuuc

SEQ ID NO: 13399 - RNA, 25 nt, Artificial Sequence
  Synthetic Oligonucleotide
gaguaaugaaaguucuuauuucuuc

SEQ ID NO: 13400 - RNA, 25 nt, Artificial Sequence
  Synthetic Oligonucleotide
gaauaaugaggggucuuauuucuuc

SEQ ID NO: 13401 - RNA, 25 nt, Artificial Sequence
  Synthetic Oligonucleotide
guaaugaaggaucuuauuucuuugg

SEQ ID NO: 13402 - RNA, 25 nt, Artificial Sequence
  Synthetic Oligonucleotide
guaaugaagggucuuauuucuucgg

SEQ ID NO: 13403 - RNA, 25 nt, Artificial Sequence
  Synthetic Oligonucleotide
guaaugagggaucuuauuucuucgg

SEQ ID NO: 13404 - RNA, 25 nt, Artificial Sequence
  Synthetic Oligonucleotide
guaaugaagguucuuauuucuucgg

SEQ ID NO: 13405 - RNA, 25 nt, Artificial Sequence
  Synthetic Oligonucleotide
guaaugaaagaucuuauuucuucgg

SEQ ID NO: 13406 - RNA, 25 nt, Artificial Sequence
  Synthetic Oligonucleotide
guaacgaaggaucuuauuucuucgg

SEQ ID NO: 13407 - RNA, 25 nt, Artificial Sequence
  Synthetic Oligonucleotide
gcaaugaaggaucuuauuucuucgg

SEQ ID NO: 13408 - RNA, 25 nt, Artificial Sequence
  Synthetic Oligonucleotide
auaaugaaggaucuuauuucuucgg

SEQ ID NO: 13409 - RNA, 25 nt, Artificial Sequence
  Synthetic Oligonucleotide
auaaugaagggucuuauuucuucgg

SEQ ID NO: 13410 - RNA, 25 nt, Artificial Sequence
  Synthetic Oligonucleotide
guaaugaaaguucuuauuucuucgg

SEQ ID NO: 13411 - RNA, 25 nt, Artificial Sequence
  Synthetic Oligonucleotide
auaaugaggggucuuauuucuucgg

SEQ ID NO: 13412 - RNA, 25 nt, Artificial Sequence
  Synthetic Oligonucleotide
caggaaaugcugagaucgaagaccu

SEQ ID NO: 13413 - RNA, 25 nt, Artificial Sequence
  Synthetic Oligonucleotide
caggaaaugcugagauugaagaucu

SEQ ID NO: 13414 - RNA, 25 nt, Artificial Sequence
  Synthetic Oligonucleotide
cagggaaugcugagaucgaagaucu

SEQ ID NO: 13415 - RNA, 25 nt, Artificial Sequence
  Synthetic Oligonucleotide
caggaaaugcugagauagaagaucu

SEQ ID NO: 13416 - RNA, 25 nt, Artificial Sequence
  Synthetic Oligonucleotide
caggaaaugcugaguucgaagaucu

SEQ ID NO: 13417 - RNA, 25 nt, Artificial Sequence
  Synthetic Oligonucleotide
caggaaaugcugaaaucgaagaucu

SEQ ID NO: 13418 - RNA, 25 nt, Artificial Sequence
  Synthetic Oligonucleotide
caggaaauacugagaucgaagaucu

SEQ ID NO: 13419 - RNA, 25 nt, Artificial Sequence
  Synthetic Oligonucleotide
caggaaacgcugagaucgaagaucu

SEQ ID NO: 13420 - RNA, 25 nt, Artificial Sequence
  Synthetic Oligonucleotide
caagaaaugcugagaucgaagaucu

SEQ ID NO: 13421 - RNA, 25 nt, Artificial Sequence
  Synthetic Oligonucleotide
ccggaaaugcugagaucgaagaucu

SEQ ID NO: 13422 - RNA, 25 nt, Artificial Sequence
  Synthetic Oligonucleotide
caggaaaugcugagcucgaagaccu

SEQ ID NO: 13423 - RNA, 25 nt, Artificial Sequence
  Synthetic Oligonucleotide
caggaaaugccgagaucgaagaccu

SEQ ID NO: 13424 - RNA, 25 nt, Artificial Sequence
  Synthetic Oligonucleotide
caggaaaugcugaaauugaagaucu

SEQ ID NO: 13425 - RNA, 25 nt, Artificial Sequence
  Synthetic Oligonucleotide
caggaaacgcugagauugaagaucu

SEQ ID NO: 13426 - RNA, 25 nt, Artificial Sequence
  Synthetic Oligonucleotide
cagggaaugcugaguucgaagaucu

SEQ ID NO: 13427 - RNA, 25 nt, Artificial Sequence
  Synthetic Oligonucleotide
caggaaaugcugaguacgaagaucu

SEQ ID NO: 13428 - RNA, 25 nt, Artificial Sequence
  Synthetic Oligonucleotide
cagggaaugcugaaauugaagaucu

SEQ ID NO: 13429 - RNA, 25 nt, Artificial Sequence
  Synthetic Oligonucleotide
cugggaaugcugagauugaagaucu

SEQ ID NO: 13430 - RNA, 25 nt, Artificial Sequence
  Synthetic Oligonucleotide
caggaaacgcugaaauugaagaucu

SEQ ID NO: 13431 - RNA, 25 nt, Artificial Sequence
  Synthetic Oligonucleotide
cuggaaaugcugaaauugaagaucu

SEQ ID NO: 13432 - RNA, 25 nt, Artificial Sequence
  Synthetic Oligonucleotide
cugggaaugcugagauugaagaccu

SEQ ID NO: 13433 - RNA, 25 nt, Artificial Sequence
  Synthetic Oligonucleotide
ccaggaaaugcugagaucgaagacc

SEQ ID NO: 13434 - RNA, 25 nt, Artificial Sequence
  Synthetic Oligonucleotide
ccaggaaaugcugagauugaagauc

SEQ ID NO: 13435 - RNA, 25 nt, Artificial Sequence
  Synthetic Oligonucleotide
ccagggaaugcugagaucgaagauc

SEQ ID NO: 13436 - RNA, 25 nt, Artificial Sequence
  Synthetic Oligonucleotide
ccaggaaaugcugagauagaagauc

SEQ ID NO: 13437 - RNA, 25 nt, Artificial Sequence
  Synthetic Oligonucleotide
ccaggaaaugcugaguucgaagauc

SEQ ID NO: 13438 - RNA, 25 nt, Artificial Sequence
  Synthetic Oligonucleotide
ccaggaaaugcugaaaucgaagauc

SEQ ID NO: 13439 - RNA, 25 nt, Artificial Sequence
  Synthetic Oligonucleotide
ccaggaaauacugagaucgaagauc

SEQ ID NO: 13440 - RNA, 25 nt, Artificial Sequence
  Synthetic Oligonucleotide
ccaggaaacgcugagaucgaagauc

SEQ ID NO: 13441 - RNA, 25 nt, Artificial Sequence
  Synthetic Oligonucleotide
ccaagaaaugcugagaucgaagauc

SEQ ID NO: 13442 - RNA, 25 nt, Artificial Sequence
  Synthetic Oligonucleotide
cccggaaaugcugagaucgaagauc

SEQ ID NO: 13443 - RNA, 25 nt, Artificial Sequence
  Synthetic Oligonucleotide
ccaggaaaugcugagcucgaagacc

SEQ ID NO: 13444 - RNA, 25 nt, Artificial Sequence
  Synthetic Oligonucleotide
ccaggaaaugccgagaucgaagacc

SEQ ID NO: 13445 - RNA, 25 nt, Artificial Sequence
  Synthetic Oligonucleotide
ccaggaaaugcugaaauugaagauc

SEQ ID NO: 13446 - RNA, 25 nt, Artificial Sequence
  Synthetic Oligonucleotide
ccaggaaacgcugagauugaagauc

SEQ ID NO: 13447 - RNA, 25 nt, Artificial Sequence
  Synthetic Oligonucleotide
ccagggaaugcugaguucgaagauc

SEQ ID NO: 13448 - RNA, 25 nt, Artificial Sequence
  Synthetic Oligonucleotide
ccaggaaaugcugaguacgaagauc

SEQ ID NO: 13449 - RNA, 25 nt, Artificial Sequence
  Synthetic Oligonucleotide
ccagggaaugcugaaauugaagauc

SEQ ID NO: 13450 - RNA, 25 nt, Artificial Sequence
  Synthetic Oligonucleotide
ccugggaaugcugagauugaagauc

SEQ ID NO: 13451 - RNA, 25 nt, Artificial Sequence
  Synthetic Oligonucleotide
ccaggaaacgcugaaauugaagauc

SEQ ID NO: 13452 - RNA, 25 nt, Artificial Sequence
  Synthetic Oligonucleotide
ccuggaaaugcugaaauugaagauc

SEQ ID NO: 13453 - RNA, 25 nt, Artificial Sequence
  Synthetic Oligonucleotide
ccugggaaugcugagauugaagacc

SEQ ID NO: 13454 - RNA, 25 nt, Artificial Sequence
  Synthetic Oligonucleotide
ggaaaugcugagaucgaagaucuaa

SEQ ID NO: 13455 - RNA, 25 nt, Artificial Sequence
  Synthetic Oligonucleotide
ggaaaugcugagaucgaagaccuca

SEQ ID NO: 13456 - RNA, 25 nt, Artificial Sequence
  Synthetic Oligonucleotide
ggaaaugcugagauugaagaucuca

SEQ ID NO: 13457 - RNA, 25 nt, Artificial Sequence
  Synthetic Oligonucleotide
gggaaugcugagaucgaagaucuca

SEQ ID NO: 13458 - RNA, 25 nt, Artificial Sequence
  Synthetic Oligonucleotide
ggaaaugcugagauagaagaucuca

SEQ ID NO: 13459 - RNA, 25 nt, Artificial Sequence
  Synthetic Oligonucleotide
ggaaaugcugaguucgaagaucuca

SEQ ID NO: 13460 - RNA, 25 nt, Artificial Sequence
  Synthetic Oligonucleotide
ggaaaugcugaaaucgaagaucuca

SEQ ID NO: 13461 - RNA, 25 nt, Artificial Sequence
  Synthetic Oligonucleotide
ggaaauacugagaucgaagaucuca

SEQ ID NO: 13462 - RNA, 25 nt, Artificial Sequence
  Synthetic Oligonucleotide
ggaaacgcugagaucgaagaucuca

SEQ ID NO: 13463 - RNA, 25 nt, Artificial Sequence
  Synthetic Oligonucleotide
agaaaugcugagaucgaagaucuca

SEQ ID NO: 13464 - RNA, 25 nt, Artificial Sequence
  Synthetic Oligonucleotide
ggaaaugcugagcucgaagaccuca

SEQ ID NO: 13465 - RNA, 25 nt, Artificial Sequence
  Synthetic Oligonucleotide
ggaaaugccgagaucgaagaccuca

SEQ ID NO: 13466 - RNA, 25 nt, Artificial Sequence
  Synthetic Oligonucleotide
gggaaugcugagauugaagaucuua

SEQ ID NO: 13467 - RNA, 25 nt, Artificial Sequence
  Synthetic Oligonucleotide
ggaaaugcugaaauugaagaucuca

SEQ ID NO: 13468 - RNA, 25 nt, Artificial Sequence
  Synthetic Oligonucleotide
ggaaacgcugagauugaagaucuca

SEQ ID NO: 13469 - RNA, 25 nt, Artificial Sequence
  Synthetic Oligonucleotide
gggaaugcugaguucgaagaucuca

SEQ ID NO: 13470 - RNA, 25 nt, Artificial Sequence
  Synthetic Oligonucleotide
gggaaugcugagauugaagaccuua

SEQ ID NO: 13471 - RNA, 25 nt, Artificial Sequence
  Synthetic Oligonucleotide
ggaaaugcugaguacgaagaucuca

SEQ ID NO: 13472 - RNA, 25 nt, Artificial Sequence
  Synthetic Oligonucleotide
gggaaugcugaaauugaagaucuca

SEQ ID NO: 13473 - RNA, 25 nt, Artificial Sequence
  Synthetic Oligonucleotide
gggaaugcugaaauugaagaucuua

SEQ ID NO: 13474 - RNA, 25 nt, Artificial Sequence
  Synthetic Oligonucleotide
ggaaacgcugaaauugaagaucuca

SEQ ID NO: 13475 - RNA, 25 nt, Artificial Sequence
  Synthetic Oligonucleotide
ggaaacgcugaaauugaagaucuua

SEQ ID NO: 13476 - RNA, 25 nt, Artificial Sequence
  Synthetic Oligonucleotide
gggaaugcugaaauugaagaucucc

SEQ ID NO: 13477 - RNA, 25 nt, Artificial Sequence
  Synthetic Oligonucleotide
aggaaaugcugagaucgaagaucua

SEQ ID NO: 13478 - RNA, 25 nt, Artificial Sequence
  Synthetic Oligonucleotide
aggaaaugcugagaucgaagaccuc

SEQ ID NO: 13479 - RNA, 25 nt, Artificial Sequence
  Synthetic Oligonucleotide
aggaaaugcugagauugaagaucuc

SEQ ID NO: 13480 - RNA, 25 nt, Artificial Sequence
  Synthetic Oligonucleotide
agggaaugcugagaucgaagaucuc

SEQ ID NO: 13481 - RNA, 25 nt, Artificial Sequence
  Synthetic Oligonucleotide
aggaaaugcugagauagaagaucuc

SEQ ID NO: 13482 - RNA, 25 nt, Artificial Sequence
  Synthetic Oligonucleotide
aggaaaugcugaguucgaagaucuc

SEQ ID NO: 13483 - RNA, 25 nt, Artificial Sequence
  Synthetic Oligonucleotide
aggaaaugcugaaaucgaagaucuc

SEQ ID NO: 13484 - RNA, 25 nt, Artificial Sequence
  Synthetic Oligonucleotide
aggaaauacugagaucgaagaucuc

SEQ ID NO: 13485 - RNA, 25 nt, Artificial Sequence
  Synthetic Oligonucleotide
aggaaacgcugagaucgaagaucuc

SEQ ID NO: 13486 - RNA, 25 nt, Artificial Sequence
  Synthetic Oligonucleotide
aagaaaugcugagaucgaagaucuc

SEQ ID NO: 13487 - RNA, 25 nt, Artificial Sequence
  Synthetic Oligonucleotide
cggaaaugcugagaucgaagaucuc

SEQ ID NO: 13488 - RNA, 25 nt, Artificial Sequence
  Synthetic Oligonucleotide
aggaaaugcugagcucgaagaccuc

SEQ ID NO: 13489 - RNA, 25 nt, Artificial Sequence
  Synthetic Oligonucleotide
aggaaaugccgagaucgaagaccuc

SEQ ID NO: 13490 - RNA, 25 nt, Artificial Sequence
  Synthetic Oligonucleotide
aggaaaugcugaaauugaagaucuc

SEQ ID NO: 13491 - RNA, 25 nt, Artificial Sequence
  Synthetic Oligonucleotide
aggaaacgcugagauugaagaucuc

SEQ ID NO: 13492 - RNA, 25 nt, Artificial Sequence
  Synthetic Oligonucleotide
agggaaugcugaguucgaagaucuc

SEQ ID NO: 13493 - RNA, 25 nt, Artificial Sequence
  Synthetic Oligonucleotide
aggaaaugcugaguacgaagaucuc

SEQ ID NO: 13494 - RNA, 25 nt, Artificial Sequence
  Synthetic Oligonucleotide
agggaaugcugaaauugaagaucuc

SEQ ID NO: 13495 - RNA, 25 nt, Artificial Sequence
  Synthetic Oligonucleotide
ugggaaugcugagauugaagaucuu

SEQ ID NO: 13496 - RNA, 25 nt, Artificial Sequence
  Synthetic Oligonucleotide
aggaaacgcugaaauugaagaucuc

SEQ ID NO: 13497 - RNA, 25 nt, Artificial Sequence
  Synthetic Oligonucleotide
uggaaaugcugaaauugaagaucuc

SEQ ID NO: 13498 - RNA, 25 nt, Artificial Sequence
  Synthetic Oligonucleotide
aggaaacgcugaaauugaagaucuu

SEQ ID NO: 13499 - RNA, 25 nt, Artificial Sequence
  Synthetic Oligonucleotide
ugggaaugcugagauugaagaccuu

SEQ ID NO: 13500 - RNA, 25 nt, Artificial Sequence
  Synthetic Oligonucleotide
ucagacaugagggcagaaauuauaa

SEQ ID NO: 13501 - RNA, 25 nt, Artificial Sequence
  Synthetic Oligonucleotide
ucagacaugagggcagaaaucauca

SEQ ID NO: 13502 - RNA, 25 nt, Artificial Sequence
  Synthetic Oligonucleotide
ucagacaugagggcagagaucauaa

SEQ ID NO: 13503 - RNA, 25 nt, Artificial Sequence
  Synthetic Oligonucleotide
ucagacaugagggcggaaaucauaa

SEQ ID NO: 13504 - RNA, 25 nt, Artificial Sequence
  Synthetic Oligonucleotide
ucagauaugagggcagaaaucauaa

SEQ ID NO: 13505 - RNA, 25 nt, Artificial Sequence
  Synthetic Oligonucleotide
ucggacaugagggcagaaaucauaa

SEQ ID NO: 13506 - RNA, 25 nt, Artificial Sequence
  Synthetic Oligonucleotide
ucggacaugagggcagaaauuauaa

SEQ ID NO: 13507 - RNA, 25 nt, Artificial Sequence
  Synthetic Oligonucleotide
ucagacaugagggcugaaaucauaa

SEQ ID NO: 13508 - RNA, 25 nt, Artificial Sequence
  Synthetic Oligonucleotide
ucagacaugagagcagaaaucauaa

SEQ ID NO: 13509 - RNA, 25 nt, Artificial Sequence
  Synthetic Oligonucleotide
ucugacaugagggcagaaaucauaa

SEQ ID NO: 13510 - RNA, 25 nt, Artificial Sequence
  Synthetic Oligonucleotide
ucagacaugagaacagaaaucauaa

SEQ ID NO: 13511 - RNA, 25 nt, Artificial Sequence
  Synthetic Oligonucleotide
ucugacaugaggacagaaaucauaa

SEQ ID NO: 13512 - RNA, 25 nt, Artificial Sequence
  Synthetic Oligonucleotide
uccgacaugaggacugaaaucauaa

SEQ ID NO: 13513 - RNA, 25 nt, Artificial Sequence
  Synthetic Oligonucleotide
ucugacaugaggaccgaaaucauaa

SEQ ID NO: 13514 - RNA, 25 nt, Artificial Sequence
  Synthetic Oligonucleotide
ucugacaugaggacugaaaucauaa

SEQ ID NO: 13515 - RNA, 25 nt, Artificial Sequence
  Synthetic Oligonucleotide
ucugacaugagaacagaaaucauaa

SEQ ID NO: 13516 - RNA, 25 nt, Artificial Sequence
  Synthetic Oligonucleotide
ucugacaugaggacugaaauuauaa

SEQ ID NO: 13517 - RNA, 25 nt, Artificial Sequence
  Synthetic Oligonucleotide
ucugacaugaggacugaaaucauca

SEQ ID NO: 13518 - RNA, 25 nt, Artificial Sequence
  Synthetic Oligonucleotide
ucugacaugaggacugaaauaauaa

SEQ ID NO: 13519 - RNA, 25 nt, Artificial Sequence
  Synthetic Oligonucleotide
aaaggaaaauuucaaacagcugcgc

SEQ ID NO: 13520 - RNA, 25 nt, Artificial Sequence
  Synthetic Oligonucleotide
aaaggaaaauuucaaacagcugcuc

SEQ ID NO: 13521 - RNA, 25 nt, Artificial Sequence
  Synthetic Oligonucleotide
aaaggaaaauuucaaacggcugcac

SEQ ID NO: 13522 - RNA, 25 nt, Artificial Sequence
  Synthetic Oligonucleotide
aaaggaaaauuucaaauagcugcac

SEQ ID NO: 13523 - RNA, 25 nt, Artificial Sequence
  Synthetic Oligonucleotide
aaaggaaaauuucagacagcugcac

SEQ ID NO: 13524 - RNA, 25 nt, Artificial Sequence
  Synthetic Oligonucleotide
aaaggaaaguuucaaacagcugcac

SEQ ID NO: 13525 - RNA, 25 nt, Artificial Sequence
  Synthetic Oligonucleotide
aaagggaaauuucaaacagcugcac

SEQ ID NO: 13526 - RNA, 25 nt, Artificial Sequence
  Synthetic Oligonucleotide
aagggaaaauuucaaacagcugcac

SEQ ID NO: 13527 - RNA, 25 nt, Artificial Sequence
  Synthetic Oligonucleotide
aaaggaaaauuucaaacaccugcac

SEQ ID NO: 13528 - RNA, 25 nt, Artificial Sequence
  Synthetic Oligonucleotide
aaaggaaaauuucaaacugcugcac

SEQ ID NO: 13529 - RNA, 25 nt, Artificial Sequence
  Synthetic Oligonucleotide
aaaggaaaauuccaaacagcugcac

SEQ ID NO: 13530 - RNA, 25 nt, Artificial Sequence
  Synthetic Oligonucleotide
aaaggaaaacuucaaacagcugcac

SEQ ID NO: 13531 - RNA, 25 nt, Artificial Sequence
  Synthetic Oligonucleotide
aaagguaaauuucaaacagcugcac

SEQ ID NO: 13532 - RNA, 25 nt, Artificial Sequence
  Synthetic Oligonucleotide
aaaggaaaauuucagacagcugccc

SEQ ID NO: 13533 - RNA, 25 nt, Artificial Sequence
  Synthetic Oligonucleotide
aaagggaaauuucaaacagcagcac

SEQ ID NO: 13534 - RNA, 25 nt, Artificial Sequence
  Synthetic Oligonucleotide
aaaggaaaauuucagacagcagcgc

SEQ ID NO: 13535 - RNA, 25 nt, Artificial Sequence
  Synthetic Oligonucleotide
aaagggaaauuucaagcagcugcac

SEQ ID NO: 13536 - RNA, 25 nt, Artificial Sequence
  Synthetic Oligonucleotide
aaagggaaauuucagacagcugcac

SEQ ID NO: 13537 - RNA, 25 nt, Artificial Sequence
  Synthetic Oligonucleotide
aaagggaaauuucaaacugcugcac

SEQ ID NO: 13538 - RNA, 25 nt, Artificial Sequence
  Synthetic Oligonucleotide
aaagggaaauuccaaacagcugcac

SEQ ID NO: 13539 - RNA, 25 nt, Artificial Sequence
  Synthetic Oligonucleotide
aaaggaaaguuucagacagcugccc

SEQ ID NO: 13540 - RNA, 25 nt, Artificial Sequence
  Synthetic Oligonucleotide
aaagggaaauuucaaacggcagcac

SEQ ID NO: 13541 - RNA, 25 nt, Artificial Sequence
  Synthetic Oligonucleotide
aaagggaaauuucagacagcugccc

SEQ ID NO: 13542 - RNA, 25 nt, Artificial Sequence
  Synthetic Oligonucleotide
aaagggaaguuucaaacagcggcac

SEQ ID NO: 13543 - RNA, 25 nt, Artificial Sequence
  Synthetic Oligonucleotide
aaagggaaauuccaaacagcagcac

SEQ ID NO: 13544 - RNA, 25 nt, Artificial Sequence
  Synthetic Oligonucleotide
aaagggaaauuucagaccgcagcac

SEQ ID NO: 13545 - RNA, 25 nt, Artificial Sequence
  Synthetic Oligonucleotide
aaagggaaacuccaaacagcagcac

SEQ ID NO: 13546 - RNA, 25 nt, Artificial Sequence
  Synthetic Oligonucleotide
aaggaaaauuucaaacagcugcgca

SEQ ID NO: 13547 - RNA, 25 nt, Artificial Sequence
  Synthetic Oligonucleotide
aaggaaaauuucaaacagcugcacc

SEQ ID NO: 13548 - RNA, 25 nt, Artificial Sequence
  Synthetic Oligonucleotide
aaggaaaauuucaaacagcugcuca

SEQ ID NO: 13549 - RNA, 25 nt, Artificial Sequence
  Synthetic Oligonucleotide
aaggaaaauuucaaacggcugcaca

SEQ ID NO: 13550 - RNA, 25 nt, Artificial Sequence
  Synthetic Oligonucleotide
aaggaaaauuucaaauagcugcaca

SEQ ID NO: 13551 - RNA, 25 nt, Artificial Sequence
  Synthetic Oligonucleotide
aaggaaaauuucagacagcugcaca

SEQ ID NO: 13552 - RNA, 25 nt, Artificial Sequence
  Synthetic Oligonucleotide
aaggaaaguuucaaacagcugcaca

SEQ ID NO: 13553 - RNA, 25 nt, Artificial Sequence
  Synthetic Oligonucleotide
aagggaaauuucaaacagcugcaca

SEQ ID NO: 13554 - RNA, 25 nt, Artificial Sequence
  Synthetic Oligonucleotide
agggaaaauuucaaacagcugcaca

SEQ ID NO: 13555 - RNA, 25 nt, Artificial Sequence
  Synthetic Oligonucleotide
aaggaaaauuucaaacaccugcaca

SEQ ID NO: 13556 - RNA, 25 nt, Artificial Sequence
  Synthetic Oligonucleotide
aaggaaaauuucaaacugcugcaca

SEQ ID NO: 13557 - RNA, 25 nt, Artificial Sequence
  Synthetic Oligonucleotide
aaggaaaauuccaaacagcugcaca

SEQ ID NO: 13558 - RNA, 25 nt, Artificial Sequence
  Synthetic Oligonucleotide
aaggaaaacuucaaacagcugcaca

SEQ ID NO: 13559 - RNA, 25 nt, Artificial Sequence
  Synthetic Oligonucleotide
aagguaaauuucaaacagcugcaca

SEQ ID NO: 13560 - RNA, 25 nt, Artificial Sequence
  Synthetic Oligonucleotide
aaggaaaauuucagacagcugccca

SEQ ID NO: 13561 - RNA, 25 nt, Artificial Sequence
  Synthetic Oligonucleotide
aagggaaauuucaaacagcagcaca

SEQ ID NO: 13562 - RNA, 25 nt, Artificial Sequence
  Synthetic Oligonucleotide
aaggaaaauuucagacagcagcgca

SEQ ID NO: 13563 - RNA, 25 nt, Artificial Sequence
  Synthetic Oligonucleotide
aagggaaauuucaagcagcugcaca

SEQ ID NO: 13564 - RNA, 25 nt, Artificial Sequence
  Synthetic Oligonucleotide
aagggaaauuucagacagcugcaca

SEQ ID NO: 13565 - RNA, 25 nt, Artificial Sequence
  Synthetic Oligonucleotide
aagggaaauuucaaacugcugcaca

SEQ ID NO: 13566 - RNA, 25 nt, Artificial Sequence
  Synthetic Oligonucleotide
aagggaaauuccaaacagcugcaca

SEQ ID NO: 13567 - RNA, 25 nt, Artificial Sequence
  Synthetic Oligonucleotide
aaggaaaguuucagacagcugccca

SEQ ID NO: 13568 - RNA, 25 nt, Artificial Sequence
  Synthetic Oligonucleotide
aagggaaauuucaaacggcagcaca

SEQ ID NO: 13569 - RNA, 25 nt, Artificial Sequence
  Synthetic Oligonucleotide
aagggaaauuucagacagcugccca

SEQ ID NO: 13570 - RNA, 25 nt, Artificial Sequence
  Synthetic Oligonucleotide
aagggaaguuucaaacagcggcaca

SEQ ID NO: 13571 - RNA, 25 nt, Artificial Sequence
  Synthetic Oligonucleotide
aagggaaauuccaaacagcagcaca

SEQ ID NO: 13572 - RNA, 25 nt, Artificial Sequence
  Synthetic Oligonucleotide
aagggaaauuucagaccgcagcaca

SEQ ID NO: 13573 - RNA, 25 nt, Artificial Sequence
  Synthetic Oligonucleotide
aagggaaacuccaaacagcagcaca

SEQ ID NO: 13574 - RNA, 25 nt, Artificial Sequence
  Synthetic Oligonucleotide
acccaggaaaugcugagauugaaga

SEQ ID NO: 13575 - RNA, 25 nt, Artificial Sequence
  Synthetic Oligonucleotide
acccaggaaaugcugagauagaaga

SEQ ID NO: 13576 - RNA, 25 nt, Artificial Sequence
  Synthetic Oligonucleotide
acccagggaaugcugagaucgaaga

SEQ ID NO: 13577 - RNA, 25 nt, Artificial Sequence
  Synthetic Oligonucleotide
auccaggaaaugcugagaucgaaga

SEQ ID NO: 13578 - RNA, 25 nt, Artificial Sequence
  Synthetic Oligonucleotide
acccaggaaaugcugaaaucgaaga

SEQ ID NO: 13579 - RNA, 25 nt, Artificial Sequence
  Synthetic Oligonucleotide
acccaggaaaugccgagaucgaaga

SEQ ID NO: 13580 - RNA, 25 nt, Artificial Sequence
  Synthetic Oligonucleotide
acccaggaaauacugagaucgaaga

SEQ ID NO: 13581 - RNA, 25 nt, Artificial Sequence
  Synthetic Oligonucleotide
acccaggaaacgcugagaucgaaga

SEQ ID NO: 13582 - RNA, 25 nt, Artificial Sequence
  Synthetic Oligonucleotide
acccaagaaaugcugagaucgaaga

SEQ ID NO: 13583 - RNA, 25 nt, Artificial Sequence
  Synthetic Oligonucleotide
accccggaaaugcugagaucgaaga

SEQ ID NO: 13584 - RNA, 25 nt, Artificial Sequence
  Synthetic Oligonucleotide
acccaggaaaugcugaaauugaaga

SEQ ID NO: 13585 - RNA, 25 nt, Artificial Sequence
  Synthetic Oligonucleotide
acccaggaaacgcugagauugaaga

SEQ ID NO: 13586 - RNA, 25 nt, Artificial Sequence
  Synthetic Oligonucleotide
acccagggaaugcugaguucgaaga

SEQ ID NO: 13587 - RNA, 25 nt, Artificial Sequence
  Synthetic Oligonucleotide
auccaggaaaugcugagcucgaaga

SEQ ID NO: 13588 - RNA, 25 nt, Artificial Sequence
  Synthetic Oligonucleotide
auccaggaaaugcugaguucgaaga

SEQ ID NO: 13589 - RNA, 25 nt, Artificial Sequence
  Synthetic Oligonucleotide
acccugggaaugcugagauugaaga

SEQ ID NO: 13590 - RNA, 25 nt, Artificial Sequence
  Synthetic Oligonucleotide
auccaggaaaugcugaaauugaaga

SEQ ID NO: 13591 - RNA, 25 nt, Artificial Sequence
  Synthetic Oligonucleotide
acccaggaaaugcugaguacgaaga

SEQ ID NO: 13592 - RNA, 25 nt, Artificial Sequence
  Synthetic Oligonucleotide
acccaggaaacgcugaaauugaaga

SEQ ID NO: 13593 - RNA, 25 nt, Artificial Sequence
  Synthetic Oligonucleotide
auccagggaaugcugaaauugaaga

SEQ ID NO: 13594 - RNA, 25 nt, Artificial Sequence
  Synthetic Oligonucleotide
auccugggaaugcugagauugaaga

SEQ ID NO: 13595 - RNA, 25 nt, Artificial Sequence
  Synthetic Oligonucleotide
acccaggaaaugcugaagaugaaga

SEQ ID NO: 13596 - RNA, 25 nt, Artificial Sequence
  Synthetic Oligonucleotide
auccuggaaaugcugaaauugaaga

SEQ ID NO: 13597 - RNA, 25 nt, Artificial Sequence
  Synthetic Oligonucleotide
aacccaggaaaugcugagauugaag

SEQ ID NO: 13598 - RNA, 25 nt, Artificial Sequence
  Synthetic Oligonucleotide
aacccaggaaaugcugagauagaag

SEQ ID NO: 13599 - RNA, 25 nt, Artificial Sequence
  Synthetic Oligonucleotide
aacccagggaaugcugagaucgaag

SEQ ID NO: 13600 - RNA, 25 nt, Artificial Sequence
  Synthetic Oligonucleotide
aauccaggaaaugcugagaucgaag

SEQ ID NO: 13601 - RNA, 25 nt, Artificial Sequence
  Synthetic Oligonucleotide
aacccaggaaaugcugaaaucgaag

SEQ ID NO: 13602 - RNA, 25 nt, Artificial Sequence
  Synthetic Oligonucleotide
aacccaggaaaugccgagaucgaag

SEQ ID NO: 13603 - RNA, 25 nt, Artificial Sequence
  Synthetic Oligonucleotide
aacccaggaaauacugagaucgaag

SEQ ID NO: 13604 - RNA, 25 nt, Artificial Sequence
  Synthetic Oligonucleotide
aacccaggaaacgcugagaucgaag

SEQ ID NO: 13605 - RNA, 25 nt, Artificial Sequence
  Synthetic Oligonucleotide
aacccaagaaaugcugagaucgaag

SEQ ID NO: 13606 - RNA, 25 nt, Artificial Sequence
  Synthetic Oligonucleotide
aaccccggaaaugcugagaucgaag

SEQ ID NO: 13607 - RNA, 25 nt, Artificial Sequence
  Synthetic Oligonucleotide
aacccaggaaaugcugaaauugaag

SEQ ID NO: 13608 - RNA, 25 nt, Artificial Sequence
  Synthetic Oligonucleotide
aacccaggaaacgcugagauugaag

SEQ ID NO: 13609 - RNA, 25 nt, Artificial Sequence
  Synthetic Oligonucleotide
aacccaggaaaugcugaguacgaag

SEQ ID NO: 13610 - RNA, 25 nt, Artificial Sequence
  Synthetic Oligonucleotide
aacccagggaaugcugaguucgaag

SEQ ID NO: 13611 - RNA, 25 nt, Artificial Sequence
  Synthetic Oligonucleotide
aauccaggaaaugcugagcucgaag

SEQ ID NO: 13612 - RNA, 25 nt, Artificial Sequence
  Synthetic Oligonucleotide
aauccaggaaaugcugaguucgaag

SEQ ID NO: 13613 - RNA, 25 nt, Artificial Sequence
  Synthetic Oligonucleotide
aacccugggaaugcugagauugaag

SEQ ID NO: 13614 - RNA, 25 nt, Artificial Sequence
  Synthetic Oligonucleotide
aauccaggaaaugcugaaauugaag

SEQ ID NO: 13615 - RNA, 25 nt, Artificial Sequence
  Synthetic Oligonucleotide
aacccaggaaacgcugaaauugaag

SEQ ID NO: 13616 - RNA, 25 nt, Artificial Sequence
  Synthetic Oligonucleotide
aacccaggaaaugcugaagaugaag

SEQ ID NO: 13617 - RNA, 25 nt, Artificial Sequence
  Synthetic Oligonucleotide
gacccagggaaugcugaguucgaag

SEQ ID NO: 13618 - RNA, 25 nt, Artificial Sequence
  Synthetic Oligonucleotide
aauccagggaaugcugaaauugaag

SEQ ID NO: 13619 - RNA, 25 nt, Artificial Sequence
  Synthetic Oligonucleotide
aauccugggaaugcugagauugaag

SEQ ID NO: 13620 - RNA, 25 nt, Artificial Sequence
  Synthetic Oligonucleotide
aauccuggaaaugcugaaauugaag

SEQ ID NO: 13621 - RNA, 25 nt, Artificial Sequence
  Synthetic Oligonucleotide
cccaggaaaugcugagaucgaagac

SEQ ID NO: 13622 - RNA, 25 nt, Artificial Sequence
  Synthetic Oligonucleotide
cccaggaaaugcugagauugaagau

SEQ ID NO: 13623 - RNA, 25 nt, Artificial Sequence
  Synthetic Oligonucleotide
cccagggaaugcugagaucgaagau

SEQ ID NO: 13624 - RNA, 25 nt, Artificial Sequence
  Synthetic Oligonucleotide
uccaggaaaugcugagaucgaagau

SEQ ID NO: 13625 - RNA, 25 nt, Artificial Sequence
  Synthetic Oligonucleotide
cccaggaaaugcugagauagaagau

SEQ ID NO: 13626 - RNA, 25 nt, Artificial Sequence
  Synthetic Oligonucleotide
cccaggaaaugcugaaaucgaagau

SEQ ID NO: 13627 - RNA, 25 nt, Artificial Sequence
  Synthetic Oligonucleotide
cccaggaaauacugagaucgaagau

SEQ ID NO: 13628 - RNA, 25 nt, Artificial Sequence
  Synthetic Oligonucleotide
cccaggaaacgcugagaucgaagau

SEQ ID NO: 13629 - RNA, 25 nt, Artificial Sequence
  Synthetic Oligonucleotide
cccaagaaaugcugagaucgaagau

SEQ ID NO: 13630 - RNA, 25 nt, Artificial Sequence
  Synthetic Oligonucleotide
ccccggaaaugcugagaucgaagau

SEQ ID NO: 13631 - RNA, 25 nt, Artificial Sequence
  Synthetic Oligonucleotide
cccaggaaaugccgagaucgaagac

SEQ ID NO: 13632 - RNA, 25 nt, Artificial Sequence
  Synthetic Oligonucleotide
cccaggaaaugcugaaauugaagau

SEQ ID NO: 13633 - RNA, 25 nt, Artificial Sequence
  Synthetic Oligonucleotide
cccaggaaacgcugagauugaagau

SEQ ID NO: 13634 - RNA, 25 nt, Artificial Sequence
  Synthetic Oligonucleotide
cccagggaaugcugaguucgaagau

SEQ ID NO: 13635 - RNA, 25 nt, Artificial Sequence
  Synthetic Oligonucleotide
uccaggaaaugcugaguucgaagau

SEQ ID NO: 13636 - RNA, 25 nt, Artificial Sequence
  Synthetic Oligonucleotide
cccaggaaaugcugaguacgaagau

SEQ ID NO: 13637 - RNA, 25 nt, Artificial Sequence
  Synthetic Oligonucleotide
uccaggaaaugcugagcucgaagac

SEQ ID NO: 13638 - RNA, 25 nt, Artificial Sequence
  Synthetic Oligonucleotide
cccugggaaugcugagauugaagau

SEQ ID NO: 13639 - RNA, 25 nt, Artificial Sequence
  Synthetic Oligonucleotide
uccaggaaaugcugaaauugaagau

SEQ ID NO: 13640 - RNA, 25 nt, Artificial Sequence
  Synthetic Oligonucleotide
cccaggaaacgcugaaauugaagau

SEQ ID NO: 13641 - RNA, 25 nt, Artificial Sequence
  Synthetic Oligonucleotide
ggaaaauuucaaacagcugcacaga

SEQ ID NO: 13642 - RNA, 25 nt, Artificial Sequence
  Synthetic Oligonucleotide
ggaaaauuucaaacagcugcgcaaa

SEQ ID NO: 13643 - RNA, 25 nt, Artificial Sequence
  Synthetic Oligonucleotide
ggaaaauuucaaacagcugcaccaa

SEQ ID NO: 13644 - RNA, 25 nt, Artificial Sequence
  Synthetic Oligonucleotide
ggaaaauuucaaacagcugcucaaa

SEQ ID NO: 13645 - RNA, 25 nt, Artificial Sequence
  Synthetic Oligonucleotide
ggaaaauuucaaacggcugcacaaa

SEQ ID NO: 13646 - RNA, 25 nt, Artificial Sequence
  Synthetic Oligonucleotide
ggaaaauuucaaauagcugcacaaa

SEQ ID NO: 13647 - RNA, 25 nt, Artificial Sequence
  Synthetic Oligonucleotide
ggaaaauuucagacagcugcacaaa

SEQ ID NO: 13648 - RNA, 25 nt, Artificial Sequence
  Synthetic Oligonucleotide
ggaaaguuucaaacagcugcacaaa

SEQ ID NO: 13649 - RNA, 25 nt, Artificial Sequence
  Synthetic Oligonucleotide
gggaaauuucaaacagcugcacaaa

SEQ ID NO: 13650 - RNA, 25 nt, Artificial Sequence
  Synthetic Oligonucleotide
ggaaaauuucagacagcugcacaga

SEQ ID NO: 13651 - RNA, 25 nt, Artificial Sequence
  Synthetic Oligonucleotide
gggaaauuucaaacagcugcacaga

SEQ ID NO: 13652 - RNA, 25 nt, Artificial Sequence
  Synthetic Oligonucleotide
ggaaaauuucaaacaccugcacaaa

SEQ ID NO: 13653 - RNA, 25 nt, Artificial Sequence
  Synthetic Oligonucleotide
ggaaaauuucaaacugcugcacaaa

SEQ ID NO: 13654 - RNA, 25 nt, Artificial Sequence
  Synthetic Oligonucleotide
ggaaaauuccaaacagcugcacaaa

SEQ ID NO: 13655 - RNA, 25 nt, Artificial Sequence
  Synthetic Oligonucleotide
ggaaaacuucaaacagcugcacaaa

SEQ ID NO: 13656 - RNA, 25 nt, Artificial Sequence
  Synthetic Oligonucleotide
gguaaauuucaaacagcugcacaaa

SEQ ID NO: 13657 - RNA, 25 nt, Artificial Sequence
  Synthetic Oligonucleotide
gggaaauuucaaacagcugcacaac

SEQ ID NO: 13658 - RNA, 25 nt, Artificial Sequence
  Synthetic Oligonucleotide
ggaaaauuucagacagcugcccaga

SEQ ID NO: 13659 - RNA, 25 nt, Artificial Sequence
  Synthetic Oligonucleotide
gggaaauuucaagcagcugcacaaa

SEQ ID NO: 13660 - RNA, 25 nt, Artificial Sequence
  Synthetic Oligonucleotide
gggaaauuucagacagcugcacaga

SEQ ID NO: 13661 - RNA, 25 nt, Artificial Sequence
  Synthetic Oligonucleotide
gggaaauuucaaacagcagcacaaa

SEQ ID NO: 13662 - RNA, 25 nt, Artificial Sequence
  Synthetic Oligonucleotide
gggaaauuucaaacugcugcacaaa

SEQ ID NO: 13663 - RNA, 25 nt, Artificial Sequence
  Synthetic Oligonucleotide
gggaaauuccaaacagcugcacaaa

SEQ ID NO: 13664 - RNA, 25 nt, Artificial Sequence
  Synthetic Oligonucleotide
ggaaaauuucagacagcagcgcaaa

SEQ ID NO: 13665 - RNA, 25 nt, Artificial Sequence
  Synthetic Oligonucleotide
ggaaaguuucagacagcugcccaga

SEQ ID NO: 13666 - RNA, 25 nt, Artificial Sequence
  Synthetic Oligonucleotide
gggaaauuucagacagcugcccaga

SEQ ID NO: 13667 - RNA, 25 nt, Artificial Sequence
  Synthetic Oligonucleotide
gggaaauuucaaacagcagcacaac

SEQ ID NO: 13668 - RNA, 25 nt, Artificial Sequence
  Synthetic Oligonucleotide
gggaaauuucaaacggcagcacaaa

SEQ ID NO: 13669 - RNA, 25 nt, Artificial Sequence
  Synthetic Oligonucleotide
gggaaguuucaaacagcggcacaaa

SEQ ID NO: 13670 - RNA, 25 nt, Artificial Sequence
  Synthetic Oligonucleotide
gggaaauuccaaacagcagcacaaa

SEQ ID NO: 13671 - RNA, 25 nt, Artificial Sequence
  Synthetic Oligonucleotide
gggaaauuccaaacagcagcacaac

SEQ ID NO: 13672 - RNA, 25 nt, Artificial Sequence
  Synthetic Oligonucleotide
aggaaaauuucaaacagcugcacag

SEQ ID NO: 13673 - RNA, 25 nt, Artificial Sequence
  Synthetic Oligonucleotide
aggaaaauuucaaacagcugcgcaa

SEQ ID NO: 13674 - RNA, 25 nt, Artificial Sequence
  Synthetic Oligonucleotide
aggaaaauuucaaacagcugcacca

SEQ ID NO: 13675 - RNA, 25 nt, Artificial Sequence
  Synthetic Oligonucleotide
aggaaaauuucaaacagcugcucaa

SEQ ID NO: 13676 - RNA, 25 nt, Artificial Sequence
  Synthetic Oligonucleotide
aggaaaauuucaaacggcugcacaa

SEQ ID NO: 13677 - RNA, 25 nt, Artificial Sequence
  Synthetic Oligonucleotide
aggaaaauuucaaauagcugcacaa

SEQ ID NO: 13678 - RNA, 25 nt, Artificial Sequence
  Synthetic Oligonucleotide
aggaaaauuucagacagcugcacaa

SEQ ID NO: 13679 - RNA, 25 nt, Artificial Sequence
  Synthetic Oligonucleotide
aggaaaguuucaaacagcugcacaa

SEQ ID NO: 13680 - RNA, 25 nt, Artificial Sequence
  Synthetic Oligonucleotide
agggaaauuucaaacagcugcacaa

SEQ ID NO: 13681 - RNA, 25 nt, Artificial Sequence
  Synthetic Oligonucleotide
gggaaaauuucaaacagcugcacaa

SEQ ID NO: 13682 - RNA, 25 nt, Artificial Sequence
  Synthetic Oligonucleotide
aggaaaauuucagacagcugcacag

SEQ ID NO: 13683 - RNA, 25 nt, Artificial Sequence
  Synthetic Oligonucleotide
agggaaauuucaaacagcugcacag

SEQ ID NO: 13684 - RNA, 25 nt, Artificial Sequence
  Synthetic Oligonucleotide
aggaaaauuucaaacaccugcacaa

SEQ ID NO: 13685 - RNA, 25 nt, Artificial Sequence
  Synthetic Oligonucleotide
aggaaaauuucaaacugcugcacaa

SEQ ID NO: 13686 - RNA, 25 nt, Artificial Sequence
  Synthetic Oligonucleotide
aggaaaauuccaaacagcugcacaa

SEQ ID NO: 13687 - RNA, 25 nt, Artificial Sequence
  Synthetic Oligonucleotide
aggaaaacuucaaacagcugcacaa

SEQ ID NO: 13688 - RNA, 25 nt, Artificial Sequence
  Synthetic Oligonucleotide
agguaaauuucaaacagcugcacaa

SEQ ID NO: 13689 - RNA, 25 nt, Artificial Sequence
  Synthetic Oligonucleotide
aggaaaauuucagacagcugcccag

SEQ ID NO: 13690 - RNA, 25 nt, Artificial Sequence
  Synthetic Oligonucleotide
agggaaauuucaagcagcugcacaa

SEQ ID NO: 13691 - RNA, 25 nt, Artificial Sequence
  Synthetic Oligonucleotide
agggaaauuucagacagcugcacag

SEQ ID NO: 13692 - RNA, 25 nt, Artificial Sequence
  Synthetic Oligonucleotide
agggaaauuucaaacagcagcacaa

SEQ ID NO: 13693 - RNA, 25 nt, Artificial Sequence
  Synthetic Oligonucleotide
agggaaauuucaaacugcugcacaa

SEQ ID NO: 13694 - RNA, 25 nt, Artificial Sequence
  Synthetic Oligonucleotide
agggaaauuccaaacagcugcacaa

SEQ ID NO: 13695 - RNA, 25 nt, Artificial Sequence
  Synthetic Oligonucleotide
aggaaaauuucagacagcagcgcaa

SEQ ID NO: 13696 - RNA, 25 nt, Artificial Sequence
  Synthetic Oligonucleotide
aggaaaguuucagacagcugcccag

SEQ ID NO: 13697 - RNA, 25 nt, Artificial Sequence
  Synthetic Oligonucleotide
agggaaauuucagacagcugcccag

SEQ ID NO: 13698 - RNA, 25 nt, Artificial Sequence
  Synthetic Oligonucleotide
agggaaauuucaaacggcagcacaa

SEQ ID NO: 13699 - RNA, 25 nt, Artificial Sequence
  Synthetic Oligonucleotide
agggaaguuucaaacagcggcacaa

SEQ ID NO: 13700 - RNA, 25 nt, Artificial Sequence
  Synthetic Oligonucleotide
agggaaauuccaaacagcagcacaa

SEQ ID NO: 13701 - RNA, 25 nt, Artificial Sequence
  Synthetic Oligonucleotide
ggaacccaggaaaugcugagauuga

SEQ ID NO: 13702 - RNA, 25 nt, Artificial Sequence
  Synthetic Oligonucleotide
ggaacccaggaaaugcugagauaga

SEQ ID NO: 13703 - RNA, 25 nt, Artificial Sequence
  Synthetic Oligonucleotide
ggaacccaggaaaugcugaaaucga

SEQ ID NO: 13704 - RNA, 25 nt, Artificial Sequence
  Synthetic Oligonucleotide
ggaacccaggaaaugcugaaauuga

SEQ ID NO: 13705 - RNA, 25 nt, Artificial Sequence
  Synthetic Oligonucleotide
ggaacccaggaaaugcugaguacga

SEQ ID NO: 13706 - RNA, 25 nt, Artificial Sequence
  Synthetic Oligonucleotide
ggaacccagggaaugcugagaucga

SEQ ID NO: 13707 - RNA, 25 nt, Artificial Sequence
  Synthetic Oligonucleotide
ggaauccaggaaaugcugagaucga

SEQ ID NO: 13708 - RNA, 25 nt, Artificial Sequence
  Synthetic Oligonucleotide
ggaacccaggaaauacugagaucga

SEQ ID NO: 13709 - RNA, 25 nt, Artificial Sequence
  Synthetic Oligonucleotide
ggaacccaggaaacgcugagaucga

SEQ ID NO: 13710 - RNA, 25 nt, Artificial Sequence
  Synthetic Oligonucleotide
ggaacccaagaaaugcugagaucga

SEQ ID NO: 13711 - RNA, 25 nt, Artificial Sequence
  Synthetic Oligonucleotide
ggaaccccggaaaugcugagaucga

SEQ ID NO: 13712 - RNA, 25 nt, Artificial Sequence
  Synthetic Oligonucleotide
gaaacccaggaaaugcugagaucga

SEQ ID NO: 13713 - RNA, 25 nt, Artificial Sequence
  Synthetic Oligonucleotide
guaacccaggaaaugcugagaucga

SEQ ID NO: 13714 - RNA, 25 nt, Artificial Sequence
  Synthetic Oligonucleotide
ggaacccaggaaacgcugagauuga

SEQ ID NO: 13715 - RNA, 25 nt, Artificial Sequence
  Synthetic Oligonucleotide
ggaacccagggaaugcugaguucga

SEQ ID NO: 13716 - RNA, 25 nt, Artificial Sequence
  Synthetic Oligonucleotide
ggaauccaggaaaugcugagcucga

SEQ ID NO: 13717 - RNA, 25 nt, Artificial Sequence
  Synthetic Oligonucleotide
ggaauccaggaaaugcugaguucga

SEQ ID NO: 13718 - RNA, 25 nt, Artificial Sequence
  Synthetic Oligonucleotide
ggaauccaggaaaugcugaaauuga

SEQ ID NO: 13719 - RNA, 25 nt, Artificial Sequence
  Synthetic Oligonucleotide
ggaacccaggaaacgcugaaauuga

SEQ ID NO: 13720 - RNA, 25 nt, Artificial Sequence
  Synthetic Oligonucleotide
gaaacccaggaaaugcugaagauga

SEQ ID NO: 13721 - RNA, 25 nt, Artificial Sequence
  Synthetic Oligonucleotide
gaaacccagggaaugcugagaucga

SEQ ID NO: 13722 - RNA, 25 nt, Artificial Sequence
  Synthetic Oligonucleotide
gggacccagggaaugcugaguucga

SEQ ID NO: 13723 - RNA, 25 nt, Artificial Sequence
  Synthetic Oligonucleotide
gaaacccaggaaaugccgagaucga

SEQ ID NO: 13724 - RNA, 25 nt, Artificial Sequence
  Synthetic Oligonucleotide
gaaauccaggaaaugcugaaauuga

SEQ ID NO: 13725 - RNA, 25 nt, Artificial Sequence
  Synthetic Oligonucleotide
gaaacccugggaaugcugagauuga

SEQ ID NO: 13726 - RNA, 25 nt, Artificial Sequence
  Synthetic Oligonucleotide
ggaauccugggaaugcugaaauuga

SEQ ID NO: 13727 - RNA, 25 nt, Artificial Sequence
  Synthetic Oligonucleotide
gaaauccagggaaugcugaaauuga

SEQ ID NO: 13728 - RNA, 25 nt, Artificial Sequence
  Synthetic Oligonucleotide
gaaauccuggaaaugcugaaauuga

SEQ ID NO: 13729 - RNA, 25 nt, Artificial Sequence
  Synthetic Oligonucleotide
gaacccaggaaaugcugagauugaa

SEQ ID NO: 13730 - RNA, 25 nt, Artificial Sequence
  Synthetic Oligonucleotide
gaacccaggaaaugcugagauagaa

SEQ ID NO: 13731 - RNA, 25 nt, Artificial Sequence
  Synthetic Oligonucleotide
gaacccaggaaaugcugaguacgaa

SEQ ID NO: 13732 - RNA, 25 nt, Artificial Sequence
  Synthetic Oligonucleotide
gaacccagggaaugcugagaucgaa

SEQ ID NO: 13733 - RNA, 25 nt, Artificial Sequence
  Synthetic Oligonucleotide
gaauccaggaaaugcugagaucgaa

SEQ ID NO: 13734 - RNA, 25 nt, Artificial Sequence
  Synthetic Oligonucleotide
gaacccaggaaaugcugaaaucgaa

SEQ ID NO: 13735 - RNA, 25 nt, Artificial Sequence
  Synthetic Oligonucleotide
gaacccaggaaauacugagaucgaa

SEQ ID NO: 13736 - RNA, 25 nt, Artificial Sequence
  Synthetic Oligonucleotide
gaacccaggaaacgcugagaucgaa

SEQ ID NO: 13737 - RNA, 25 nt, Artificial Sequence
  Synthetic Oligonucleotide
gaacccaagaaaugcugagaucgaa

SEQ ID NO: 13738 - RNA, 25 nt, Artificial Sequence
  Synthetic Oligonucleotide
gaaccccggaaaugcugagaucgaa

SEQ ID NO: 13739 - RNA, 25 nt, Artificial Sequence
  Synthetic Oligonucleotide
aaacccaggaaaugcugagaucgaa

SEQ ID NO: 13740 - RNA, 25 nt, Artificial Sequence
  Synthetic Oligonucleotide
uaacccaggaaaugcugagaucgaa

SEQ ID NO: 13741 - RNA, 25 nt, Artificial Sequence
  Synthetic Oligonucleotide
gaacccaggaaaugcugaaauugaa

SEQ ID NO: 13742 - RNA, 25 nt, Artificial Sequence
  Synthetic Oligonucleotide
gaacccaggaaacgcugagauugaa

SEQ ID NO: 13743 - RNA, 25 nt, Artificial Sequence
  Synthetic Oligonucleotide
gaacccagggaaugcugaguucgaa

SEQ ID NO: 13744 - RNA, 25 nt, Artificial Sequence
  Synthetic Oligonucleotide
gaauccaggaaaugcugagcucgaa

SEQ ID NO: 13745 - RNA, 25 nt, Artificial Sequence
  Synthetic Oligonucleotide
gaauccaggaaaugcugaguucgaa

SEQ ID NO: 13746 - RNA, 25 nt, Artificial Sequence
  Synthetic Oligonucleotide
aaacccagggaaugcugagaucgaa

SEQ ID NO: 13747 - RNA, 25 nt, Artificial Sequence
  Synthetic Oligonucleotide
gaauccaggaaaugcugaaauugaa

SEQ ID NO: 13748 - RNA, 25 nt, Artificial Sequence
  Synthetic Oligonucleotide
ggacccagggaaugcugaguucgaa

SEQ ID NO: 13749 - RNA, 25 nt, Artificial Sequence
  Synthetic Oligonucleotide
aaacccaggaaaugccgagaucgaa

SEQ ID NO: 13750 - RNA, 25 nt, Artificial Sequence
  Synthetic Oligonucleotide
gaacccaggaaacgcugaaauugaa

SEQ ID NO: 13751 - RNA, 25 nt, Artificial Sequence
  Synthetic Oligonucleotide
aaacccaggaaaugcugaagaugaa

SEQ ID NO: 13752 - RNA, 25 nt, Artificial Sequence
  Synthetic Oligonucleotide
aaacccugggaaugcugagauugaa

SEQ ID NO: 13753 - RNA, 25 nt, Artificial Sequence
  Synthetic Oligonucleotide
aaauccaggaaaugcugaaauugaa

SEQ ID NO: 13754 - RNA, 25 nt, Artificial Sequence
  Synthetic Oligonucleotide
cggaacccaggaaaugcugagauug

SEQ ID NO: 13755 - RNA, 25 nt, Artificial Sequence
  Synthetic Oligonucleotide
cggaacccaggaaaugcugagauag

SEQ ID NO: 13756 - RNA, 25 nt, Artificial Sequence
  Synthetic Oligonucleotide
cggaacccaggaaaugcugaaaucg

SEQ ID NO: 13757 - RNA, 25 nt, Artificial Sequence
  Synthetic Oligonucleotide
cggaacccaggaaaugcugaaauug

SEQ ID NO: 13758 - RNA, 25 nt, Artificial Sequence
  Synthetic Oligonucleotide
cggaacccaggaaaugcugaguacg

SEQ ID NO: 13759 - RNA, 25 nt, Artificial Sequence
  Synthetic Oligonucleotide
cggaacccagggaaugcugagaucg

SEQ ID NO: 13760 - RNA, 25 nt, Artificial Sequence
  Synthetic Oligonucleotide
cggaauccaggaaaugcugagaucg

SEQ ID NO: 13761 - RNA, 25 nt, Artificial Sequence
  Synthetic Oligonucleotide
uggaacccaggaaaugcugagaucg

SEQ ID NO: 13762 - RNA, 25 nt, Artificial Sequence
  Synthetic Oligonucleotide
cggaacccaggaaauacugagaucg

SEQ ID NO: 13763 - RNA, 25 nt, Artificial Sequence
  Synthetic Oligonucleotide
cggaacccaggaaacgcugagaucg

SEQ ID NO: 13764 - RNA, 25 nt, Artificial Sequence
  Synthetic Oligonucleotide
cggaacccaagaaaugcugagaucg

SEQ ID NO: 13765 - RNA, 25 nt, Artificial Sequence
  Synthetic Oligonucleotide
cggaaccccggaaaugcugagaucg

SEQ ID NO: 13766 - RNA, 25 nt, Artificial Sequence
  Synthetic Oligonucleotide
cgaaacccaggaaaugcugagaucg

SEQ ID NO: 13767 - RNA, 25 nt, Artificial Sequence
  Synthetic Oligonucleotide
cguaacccaggaaaugcugagaucg

SEQ ID NO: 13768 - RNA, 25 nt, Artificial Sequence
  Synthetic Oligonucleotide
aggaacccaggaaaugcugagaucg

SEQ ID NO: 13769 - RNA, 25 nt, Artificial Sequence
  Synthetic Oligonucleotide
cggaacccaggaaacgcugagauug

SEQ ID NO: 13770 - RNA, 25 nt, Artificial Sequence
  Synthetic Oligonucleotide
cggaacccagggaaugcugaguucg

SEQ ID NO: 13771 - RNA, 25 nt, Artificial Sequence
  Synthetic Oligonucleotide
cggaauccaggaaaugcugagcucg

SEQ ID NO: 13772 - RNA, 25 nt, Artificial Sequence
  Synthetic Oligonucleotide
cggaauccaggaaaugcugaguucg

SEQ ID NO: 13773 - RNA, 25 nt, Artificial Sequence
  Synthetic Oligonucleotide
cggaauccaggaaaugcugaaauug

SEQ ID NO: 13774 - RNA, 25 nt, Artificial Sequence
  Synthetic Oligonucleotide
cggaacccaggaaacgcugaaauug

SEQ ID NO: 13775 - RNA, 25 nt, Artificial Sequence
  Synthetic Oligonucleotide
cgaaacccaggaaaugcugaagaug

SEQ ID NO: 13776 - RNA, 25 nt, Artificial Sequence
  Synthetic Oligonucleotide
cgaaacccagggaaugcugagaucg

SEQ ID NO: 13777 - RNA, 25 nt, Artificial Sequence
  Synthetic Oligonucleotide
cgggacccagggaaugcugaguucg

SEQ ID NO: 13778 - RNA, 25 nt, Artificial Sequence
  Synthetic Oligonucleotide
cgaaacccaggaaaugccgagaucg

SEQ ID NO: 13779 - RNA, 25 nt, Artificial Sequence
  Synthetic Oligonucleotide
cggaauccugggaaugcugaaauug

SEQ ID NO: 13780 - RNA, 25 nt, Artificial Sequence
  Synthetic Oligonucleotide
agaaauccaggaaaugcugaaauug

SEQ ID NO: 13781 - RNA, 25 nt, Artificial Sequence
  Synthetic Oligonucleotide
agaggaguacaaauugcuucaaacg

SEQ ID NO: 13782 - RNA, 25 nt, Artificial Sequence
  Synthetic Oligonucleotide
agaggaguacaaauugcuuccaaug

SEQ ID NO: 13783 - RNA, 25 nt, Artificial Sequence
  Synthetic Oligonucleotide
agaggaguacaaguugcuucaaaug

SEQ ID NO: 13784 - RNA, 25 nt, Artificial Sequence
  Synthetic Oligonucleotide
agaggaguacagauugcuucaaaug

SEQ ID NO: 13785 - RNA, 25 nt, Artificial Sequence
  Synthetic Oligonucleotide
agaggagugcaaauugcuucaaaug

SEQ ID NO: 13786 - RNA, 25 nt, Artificial Sequence
  Synthetic Oligonucleotide
agagggguacaaauugcuucaaaug

SEQ ID NO: 13787 - RNA, 25 nt, Artificial Sequence
  Synthetic Oligonucleotide
aggggaguacaaauugcuucaaaug

SEQ ID NO: 13788 - RNA, 25 nt, Artificial Sequence
  Synthetic Oligonucleotide
agaggaguacaaauugccucaaaug

SEQ ID NO: 13789 - RNA, 25 nt, Artificial Sequence
  Synthetic Oligonucleotide
agaggaguacaaauwgcuucaaaug

SEQ ID NO: 13790 - RNA, 25 nt, Artificial Sequence
  Synthetic Oligonucleotide
agaggaguucaaauugcuucaaaug

SEQ ID NO: 13791 - RNA, 25 nt, Artificial Sequence
  Synthetic Oligonucleotide
agaggagcacaaauugcuucaaaug

SEQ ID NO: 13792 - RNA, 25 nt, Artificial Sequence
  Synthetic Oligonucleotide
agaggaauacaaauugcuucaaaug

SEQ ID NO: 13793 - RNA, 25 nt, Artificial Sequence
  Synthetic Oligonucleotide
agaggaguucaaauugcuuccaaug

SEQ ID NO: 13794 - RNA, 25 nt, Artificial Sequence
  Synthetic Oligonucleotide
agaggaguucagauugcuucaaaug

SEQ ID NO: 13795 - RNA, 25 nt, Artificial Sequence
  Synthetic Oligonucleotide
agagggguucaaauugcuucaaaug

SEQ ID NO: 13796 - RNA, 25 nt, Artificial Sequence
  Synthetic Oligonucleotide
agagggguucaaauugcuucaagug

SEQ ID NO: 13797 - RNA, 25 nt, Artificial Sequence
  Synthetic Oligonucleotide
agaggaguucaaauugccucaaaug

SEQ ID NO: 13798 - RNA, 25 nt, Artificial Sequence
  Synthetic Oligonucleotide
agaggaauucaaauugcuucaaaug

SEQ ID NO: 13799 - RNA, 25 nt, Artificial Sequence
  Synthetic Oligonucleotide
agagggguucagauugcuucaaaug

SEQ ID NO: 13800 - RNA, 25 nt, Artificial Sequence
  Synthetic Oligonucleotide
agaggaguucagauugcgucaaaug

SEQ ID NO: 13801 - RNA, 25 nt, Artificial Sequence
  Synthetic Oligonucleotide
agagggguucagauugcuuccaaug

SEQ ID NO: 13802 - RNA, 25 nt, Artificial Sequence
  Synthetic Oligonucleotide
agagguguucaaauagcuucaaaug

SEQ ID NO: 13803 - RNA, 25 nt, Artificial Sequence
  Synthetic Oligonucleotide
gaggaguacaaauugcuucaaacga

SEQ ID NO: 13804 - RNA, 25 nt, Artificial Sequence
  Synthetic Oligonucleotide
gaggaguacaaauugcuuccaauga

SEQ ID NO: 13805 - RNA, 25 nt, Artificial Sequence
  Synthetic Oligonucleotide
gaggaguacaaguugcuucaaauga

SEQ ID NO: 13806 - RNA, 25 nt, Artificial Sequence
  Synthetic Oligonucleotide
gaggaguacagauugcuucaaauga

SEQ ID NO: 13807 - RNA, 25 nt, Artificial Sequence
  Synthetic Oligonucleotide
gaggagugcaaauugcuucaaauga

SEQ ID NO: 13808 - RNA, 25 nt, Artificial Sequence
  Synthetic Oligonucleotide
gagggguacaaauugcuucaaauga

SEQ ID NO: 13809 - RNA, 25 nt, Artificial Sequence
  Synthetic Oligonucleotide
ggggaguacaaauugcuucaaauga

SEQ ID NO: 13810 - RNA, 25 nt, Artificial Sequence
  Synthetic Oligonucleotide
gaggaguacaaauugccucaaauga

SEQ ID NO: 13811 - RNA, 25 nt, Artificial Sequence
  Synthetic Oligonucleotide
gaggaguacaaauwgcuucaaauga

SEQ ID NO: 13812 - RNA, 25 nt, Artificial Sequence
  Synthetic Oligonucleotide
gaggaguucaaauugcuucaaauga

SEQ ID NO: 13813 - RNA, 25 nt, Artificial Sequence
  Synthetic Oligonucleotide
gaggagcacaaauugcuucaaauga

SEQ ID NO: 13814 - RNA, 25 nt, Artificial Sequence
  Synthetic Oligonucleotide
gaggaauacaaauugcuucaaauga

SEQ ID NO: 13815 - RNA, 25 nt, Artificial Sequence
  Synthetic Oligonucleotide
gaggaguucaaauugcuuccaauga

SEQ ID NO: 13816 - RNA, 25 nt, Artificial Sequence
  Synthetic Oligonucleotide
gaggaguucagauugcuucaaauga

SEQ ID NO: 13817 - RNA, 25 nt, Artificial Sequence
  Synthetic Oligonucleotide
gagggguucaaauugcuucaaauga

SEQ ID NO: 13818 - RNA, 25 nt, Artificial Sequence
  Synthetic Oligonucleotide
gagggguucaaauugcuucaaguga

SEQ ID NO: 13819 - RNA, 25 nt, Artificial Sequence
  Synthetic Oligonucleotide
gaggaguucaaauugccucaaauga

SEQ ID NO: 13820 - RNA, 25 nt, Artificial Sequence
  Synthetic Oligonucleotide
gaggaauucaaauugcuucaaauga

SEQ ID NO: 13821 - RNA, 25 nt, Artificial Sequence
  Synthetic Oligonucleotide
gagggguucagauugcuucaaauga

SEQ ID NO: 13822 - RNA, 25 nt, Artificial Sequence
  Synthetic Oligonucleotide
gaggaguucagauugcgucaaauga

SEQ ID NO: 13823 - RNA, 25 nt, Artificial Sequence
  Synthetic Oligonucleotide
gagggguucagauugcuuccaauga

SEQ ID NO: 13824 - RNA, 25 nt, Artificial Sequence
  Synthetic Oligonucleotide
gagguguucaaauagcuucaaauga

SEQ ID NO: 13825 - RNA, 25 nt, Artificial Sequence
  Synthetic Oligonucleotide
uucacgcucaccgugcccagugaac

SEQ ID NO: 13826 - RNA, 25 nt, Artificial Sequence
  Synthetic Oligonucleotide
uucacgcucaccgugcccaguaagc

SEQ ID NO: 13827 - RNA, 25 nt, Artificial Sequence
  Synthetic Oligonucleotide
uucacgcucaccgugcccagcgagc

SEQ ID NO: 13828 - RNA, 25 nt, Artificial Sequence
  Synthetic Oligonucleotide
uucacgcucaccgugcccacugagc

SEQ ID NO: 13829 - RNA, 25 nt, Artificial Sequence
  Synthetic Oligonucleotide
uucacgcucaccgugccuagugagc

SEQ ID NO: 13830 - RNA, 25 nt, Artificial Sequence
  Synthetic Oligonucleotide
uucacgcucacugugcccagugagc

SEQ ID NO: 13831 - RNA, 25 nt, Artificial Sequence
  Synthetic Oligonucleotide
uucacgcucaccgugccaagugagc

SEQ ID NO: 13832 - RNA, 25 nt, Artificial Sequence
  Synthetic Oligonucleotide
uucacacucaccgugcccagugagc

SEQ ID NO: 13833 - RNA, 25 nt, Artificial Sequence
  Synthetic Oligonucleotide
uacacgcucaccgugcccagugagc

SEQ ID NO: 13834 - RNA, 25 nt, Artificial Sequence
  Synthetic Oligonucleotide
uucacgcucaccugucccagugagc

SEQ ID NO: 13835 - RNA, 25 nt, Artificial Sequence
  Synthetic Oligonucleotide
ucacgcucaccgugcccagugaacg

SEQ ID NO: 13836 - RNA, 25 nt, Artificial Sequence
  Synthetic Oligonucleotide
ucacgcucaccgugcccaguaagcg

SEQ ID NO: 13837 - RNA, 25 nt, Artificial Sequence
  Synthetic Oligonucleotide
ucacgcucaccgugcccagcgagcg

SEQ ID NO: 13838 - RNA, 25 nt, Artificial Sequence
  Synthetic Oligonucleotide
ucacgcucaccgugccuagugagcg

SEQ ID NO: 13839 - RNA, 25 nt, Artificial Sequence
  Synthetic Oligonucleotide
ucacgcucacugugcccagugagcg

SEQ ID NO: 13840 - RNA, 25 nt, Artificial Sequence
  Synthetic Oligonucleotide
ucacgcucaccgugcccacugagcg

SEQ ID NO: 13841 - RNA, 25 nt, Artificial Sequence
  Synthetic Oligonucleotide
ucacgcucaccgugccaagugagcg

SEQ ID NO: 13842 - RNA, 25 nt, Artificial Sequence
  Synthetic Oligonucleotide
ucacacucaccgugcccagugagcg

SEQ ID NO: 13843 - RNA, 25 nt, Artificial Sequence
  Synthetic Oligonucleotide
acacgcucaccgugcccagugagcg

SEQ ID NO: 13844 - RNA, 25 nt, Artificial Sequence
  Synthetic Oligonucleotide
ucacgcucaccugucccagugagcg

SEQ ID NO: 13845 - RNA, 25 nt, Artificial Sequence
  Synthetic Oligonucleotide
gacugcagcguagacgcuuuguuca

SEQ ID NO: 13846 - RNA, 25 nt, Artificial Sequence
  Synthetic Oligonucleotide
gacugcagcguagacgcuucgucca

SEQ ID NO: 13847 - RNA, 25 nt, Artificial Sequence
  Synthetic Oligonucleotide
gacugcagcguagacguuuugucca

SEQ ID NO: 13848 - RNA, 25 nt, Artificial Sequence
  Synthetic Oligonucleotide
gacugcagcguagacgauuugucca

SEQ ID NO: 13849 - RNA, 25 nt, Artificial Sequence
  Synthetic Oligonucleotide
gacugcagcguagacgguuugucca

SEQ ID NO: 13850 - RNA, 25 nt, Artificial Sequence
  Synthetic Oligonucleotide
gacugcagcguaaacgcuuugucca

SEQ ID NO: 13851 - RNA, 25 nt, Artificial Sequence
  Synthetic Oligonucleotide
gacugcagcguacacgcuuugucca

SEQ ID NO: 13852 - RNA, 25 nt, Artificial Sequence
  Synthetic Oligonucleotide
gacugcagcguauacgcuuugucca

SEQ ID NO: 13853 - RNA, 25 nt, Artificial Sequence
  Synthetic Oligonucleotide
gacugcaacguagacgcuuugucca

SEQ ID NO: 13854 - RNA, 25 nt, Artificial Sequence
  Synthetic Oligonucleotide
gacugcaacguagacgcuuuguuca

SEQ ID NO: 13855 - RNA, 25 nt, Artificial Sequence
  Synthetic Oligonucleotide
gacugcagcguauacgauuugucca

SEQ ID NO: 13856 - RNA, 25 nt, Artificial Sequence
  Synthetic Oligonucleotide
gacugcaacguauacgcuuugucca

SEQ ID NO: 13857 - RNA, 25 nt, Artificial Sequence
  Synthetic Oligonucleotide
gacugcaucguacacucuuugucca

SEQ ID NO: 13858 - RNA, 25 nt, Artificial Sequence
  Synthetic Oligonucleotide
ggacugcagcguagacgcuuuguuc

SEQ ID NO: 13859 - RNA, 25 nt, Artificial Sequence
  Synthetic Oligonucleotide
ggacugcagcguagacgcuucgucc

SEQ ID NO: 13860 - RNA, 25 nt, Artificial Sequence
  Synthetic Oligonucleotide
ggacugcagcguagacguuuugucc

SEQ ID NO: 13861 - RNA, 25 nt, Artificial Sequence
  Synthetic Oligonucleotide
ggacugcagcguagacgauuugucc

SEQ ID NO: 13862 - RNA, 25 nt, Artificial Sequence
  Synthetic Oligonucleotide
ggacugcagcguagacgguuugucc

SEQ ID NO: 13863 - RNA, 25 nt, Artificial Sequence
  Synthetic Oligonucleotide
ggacugcagcguaaacgcuuugucc

SEQ ID NO: 13864 - RNA, 25 nt, Artificial Sequence
  Synthetic Oligonucleotide
ggacugcagcguacacgcuuugucc

SEQ ID NO: 13865 - RNA, 25 nt, Artificial Sequence
  Synthetic Oligonucleotide
ggacugcagcguauacgcuuugucc

SEQ ID NO: 13866 - RNA, 25 nt, Artificial Sequence
  Synthetic Oligonucleotide
ggacugcaacguagacgcuuugucc

SEQ ID NO: 13867 - RNA, 25 nt, Artificial Sequence
  Synthetic Oligonucleotide
ggacugcaacguagacgcuuuguuc

SEQ ID NO: 13868 - RNA, 25 nt, Artificial Sequence
  Synthetic Oligonucleotide
ggacugcagcguauacgauuugucc

SEQ ID NO: 13869 - RNA, 25 nt, Artificial Sequence
  Synthetic Oligonucleotide
ggacugcaacguauacgcuuugucc

SEQ ID NO: 13870 - RNA, 25 nt, Artificial Sequence
  Synthetic Oligonucleotide
ggacugcaucguacacucuuugucc

SEQ ID NO: 13871 - RNA, 25 nt, Artificial Sequence
  Synthetic Oligonucleotide
guagacgcuuuguccaaaaugcucu

SEQ ID NO: 13872 - RNA, 25 nt, Artificial Sequence
  Synthetic Oligonucleotide
guagacgcuuuguccaaaauguccu

SEQ ID NO: 13873 - RNA, 25 nt, Artificial Sequence
  Synthetic Oligonucleotide
guagacgcuuuguccaaaaugcacu

SEQ ID NO: 13874 - RNA, 25 nt, Artificial Sequence
  Synthetic Oligonucleotide
guagacgcuuuguccaaaacgcccu

SEQ ID NO: 13875 - RNA, 25 nt, Artificial Sequence
  Synthetic Oligonucleotide
guagacgcuuuguccagaaugcccu

SEQ ID NO: 13876 - RNA, 25 nt, Artificial Sequence
  Synthetic Oligonucleotide
guagacgcuuuguucaaaaugcccu

SEQ ID NO: 13877 - RNA, 25 nt, Artificial Sequence
  Synthetic Oligonucleotide
guagacguuuuguccaaaaugcccu

SEQ ID NO: 13878 - RNA, 25 nt, Artificial Sequence
  Synthetic Oligonucleotide
guagacgcuucguccaaaaugcccu

SEQ ID NO: 13879 - RNA, 25 nt, Artificial Sequence
  Synthetic Oligonucleotide
guagacgauuuguccaaaaugcccu

SEQ ID NO: 13880 - RNA, 25 nt, Artificial Sequence
  Synthetic Oligonucleotide
guagacgguuuguccaaaaugcccu

SEQ ID NO: 13881 - RNA, 25 nt, Artificial Sequence
  Synthetic Oligonucleotide
guacacgcuuuguccaaaaugcccu

SEQ ID NO: 13882 - RNA, 25 nt, Artificial Sequence
  Synthetic Oligonucleotide
guauacgcuuuguccaaaaugcccu

SEQ ID NO: 13883 - RNA, 25 nt, Artificial Sequence
  Synthetic Oligonucleotide
guagacgcuuuguccagaacgcccu

SEQ ID NO: 13884 - RNA, 25 nt, Artificial Sequence
  Synthetic Oligonucleotide
guagacgcuuuguccagaacgcucu

SEQ ID NO: 13885 - RNA, 25 nt, Artificial Sequence
  Synthetic Oligonucleotide
guagacgcuuuguucagaaugcccu

SEQ ID NO: 13886 - RNA, 25 nt, Artificial Sequence
  Synthetic Oligonucleotide
guagacguuuuguccagaaugcccu

SEQ ID NO: 13887 - RNA, 25 nt, Artificial Sequence
  Synthetic Oligonucleotide
guaaacgcuuuguccagaaugcccu

SEQ ID NO: 13888 - RNA, 25 nt, Artificial Sequence
  Synthetic Oligonucleotide
guacacucuuuguccaaaaugcccu

SEQ ID NO: 13889 - RNA, 25 nt, Artificial Sequence
  Synthetic Oligonucleotide
guauacgauuuguccaaaaugcccu

SEQ ID NO: 13890 - RNA, 25 nt, Artificial Sequence
  Synthetic Oligonucleotide
cguagacgcuuuguccaaaaugcuc

SEQ ID NO: 13891 - RNA, 25 nt, Artificial Sequence
  Synthetic Oligonucleotide
cguagacgcuuuguccaaaaugucc

SEQ ID NO: 13892 - RNA, 25 nt, Artificial Sequence
  Synthetic Oligonucleotide
cguagacgcuuuguccaaaaugcac

SEQ ID NO: 13893 - RNA, 25 nt, Artificial Sequence
  Synthetic Oligonucleotide
cguagacgcuuuguccaaaacgccc

SEQ ID NO: 13894 - RNA, 25 nt, Artificial Sequence
  Synthetic Oligonucleotide
cguagacgcuuuguccagaaugccc

SEQ ID NO: 13895 - RNA, 25 nt, Artificial Sequence
  Synthetic Oligonucleotide
cguagacgcuuuguucaaaaugccc

SEQ ID NO: 13896 - RNA, 25 nt, Artificial Sequence
  Synthetic Oligonucleotide
cguagacguuuuguccaaaaugccc

SEQ ID NO: 13897 - RNA, 25 nt, Artificial Sequence
  Synthetic Oligonucleotide
cguagacgcuucguccaaaaugccc

SEQ ID NO: 13898 - RNA, 25 nt, Artificial Sequence
  Synthetic Oligonucleotide
cguagacgauuuguccaaaaugccc

SEQ ID NO: 13899 - RNA, 25 nt, Artificial Sequence
  Synthetic Oligonucleotide
cguagacgguuuguccaaaaugccc

SEQ ID NO: 13900 - RNA, 25 nt, Artificial Sequence
  Synthetic Oligonucleotide
cguacacgcuuuguccaaaaugccc

SEQ ID NO: 13901 - RNA, 25 nt, Artificial Sequence
  Synthetic Oligonucleotide
cguauacgcuuuguccaaaaugccc

SEQ ID NO: 13902 - RNA, 25 nt, Artificial Sequence
  Synthetic Oligonucleotide
cguagacgcuuuguccagaacgccc

SEQ ID NO: 13903 - RNA, 25 nt, Artificial Sequence
  Synthetic Oligonucleotide
cguagacgcuuuguccagaacgcuc

SEQ ID NO: 13904 - RNA, 25 nt, Artificial Sequence
  Synthetic Oligonucleotide
cguagacgcuuuguucagaaugccc

SEQ ID NO: 13905 - RNA, 25 nt, Artificial Sequence
  Synthetic Oligonucleotide
cguagacguuuuguccagaaugccc

SEQ ID NO: 13906 - RNA, 25 nt, Artificial Sequence
  Synthetic Oligonucleotide
cguaaacgcuuuguccagaaugccc

SEQ ID NO: 13907 - RNA, 25 nt, Artificial Sequence
  Synthetic Oligonucleotide
cguacacucuuuguccaaaaugccc

SEQ ID NO: 13908 - RNA, 25 nt, Artificial Sequence
  Synthetic Oligonucleotide
cguauacgauuuguccaaaaugccc

SEQ ID NO: 13909 - RNA, 25 nt, Artificial Sequence
  Synthetic Oligonucleotide
ugcagcguagacgcuuuguccagaa

SEQ ID NO: 13910 - RNA, 25 nt, Artificial Sequence
  Synthetic Oligonucleotide
ugcagcguagacgcuuuguucaaaa

SEQ ID NO: 13911 - RNA, 25 nt, Artificial Sequence
  Synthetic Oligonucleotide
ugcagcguagacgcuuuguucagaa

SEQ ID NO: 13912 - RNA, 25 nt, Artificial Sequence
  Synthetic Oligonucleotide
ugcagcguagacguuuuguccaaaa

SEQ ID NO: 13913 - RNA, 25 nt, Artificial Sequence
  Synthetic Oligonucleotide
ugcagcguagacguuuuguccagaa

SEQ ID NO: 13914 - RNA, 25 nt, Artificial Sequence
  Synthetic Oligonucleotide
ugcagcguagacgcuucguccaaaa

SEQ ID NO: 13915 - RNA, 25 nt, Artificial Sequence
  Synthetic Oligonucleotide
ugcagcguagacgauuuguccaaaa

SEQ ID NO: 13916 - RNA, 25 nt, Artificial Sequence
  Synthetic Oligonucleotide
ugcagcguagacgguuuguccaaaa

SEQ ID NO: 13917 - RNA, 25 nt, Artificial Sequence
  Synthetic Oligonucleotide
ugcagcguacacgcuuuguccaaaa

SEQ ID NO: 13918 - RNA, 25 nt, Artificial Sequence
  Synthetic Oligonucleotide
ugcagcguauacgcuuuguccaaaa

SEQ ID NO: 13919 - RNA, 25 nt, Artificial Sequence
  Synthetic Oligonucleotide
ugcaacguagacgcuuuguccaaaa

SEQ ID NO: 13920 - RNA, 25 nt, Artificial Sequence
  Synthetic Oligonucleotide
ugcagcguaaacgcuuuguccagaa

SEQ ID NO: 13921 - RNA, 25 nt, Artificial Sequence
  Synthetic Oligonucleotide
ugcaacguagacgcuuuguucaaaa

SEQ ID NO: 13922 - RNA, 25 nt, Artificial Sequence
  Synthetic Oligonucleotide
ugcagcguauacgauuuguccaaaa

SEQ ID NO: 13923 - RNA, 25 nt, Artificial Sequence
  Synthetic Oligonucleotide
ugcaacguauacgcuuuguccaaaa

SEQ ID NO: 13924 - RNA, 25 nt, Artificial Sequence
  Synthetic Oligonucleotide
ugcaucguacacucuuuguccaaaa

SEQ ID NO: 13925 - RNA, 25 nt, Artificial Sequence
  Synthetic Oligonucleotide
cugcagcguagacgcuuuguccaga

SEQ ID NO: 13926 - RNA, 25 nt, Artificial Sequence
  Synthetic Oligonucleotide
cugcagcguagacgcuuuguucaaa

SEQ ID NO: 13927 - RNA, 25 nt, Artificial Sequence
  Synthetic Oligonucleotide
cugcagcguagacgcuuuguucaga

SEQ ID NO: 13928 - RNA, 25 nt, Artificial Sequence
  Synthetic Oligonucleotide
cugcagcguagacguuuuguccaaa

SEQ ID NO: 13929 - RNA, 25 nt, Artificial Sequence
  Synthetic Oligonucleotide
cugcagcguagacguuuuguccaga

SEQ ID NO: 13930 - RNA, 25 nt, Artificial Sequence
  Synthetic Oligonucleotide
cugcagcguagacgcuucguccaaa

SEQ ID NO: 13931 - RNA, 25 nt, Artificial Sequence
  Synthetic Oligonucleotide
cugcagcguagacgauuuguccaaa

SEQ ID NO: 13932 - RNA, 25 nt, Artificial Sequence
  Synthetic Oligonucleotide
cugcagcguagacgguuuguccaaa

SEQ ID NO: 13933 - RNA, 25 nt, Artificial Sequence
  Synthetic Oligonucleotide
cugcagcguacacgcuuuguccaaa

SEQ ID NO: 13934 - RNA, 25 nt, Artificial Sequence
  Synthetic Oligonucleotide
cugcagcguauacgcuuuguccaaa

SEQ ID NO: 13935 - RNA, 25 nt, Artificial Sequence
  Synthetic Oligonucleotide
cugcaacguagacgcuuuguccaaa

SEQ ID NO: 13936 - RNA, 25 nt, Artificial Sequence
  Synthetic Oligonucleotide
cugcagcguaaacgcuuuguccaga

SEQ ID NO: 13937 - RNA, 25 nt, Artificial Sequence
  Synthetic Oligonucleotide
cugcaacguagacgcuuuguucaaa

SEQ ID NO: 13938 - RNA, 25 nt, Artificial Sequence
  Synthetic Oligonucleotide
cugcagcguauacgauuuguccaaa

SEQ ID NO: 13939 - RNA, 25 nt, Artificial Sequence
  Synthetic Oligonucleotide
cugcaacguauacgcuuuguccaaa

SEQ ID NO: 13940 - RNA, 25 nt, Artificial Sequence
  Synthetic Oligonucleotide
cugcaucguacacucuuuguccaaa

SEQ ID NO: 13941 - RNA, 25 nt, Artificial Sequence
  Synthetic Oligonucleotide
acugcagcguagacgcuuuguccag

SEQ ID NO: 13942 - RNA, 25 nt, Artificial Sequence
  Synthetic Oligonucleotide
acugcagcguagacgcuuuguucaa

SEQ ID NO: 13943 - RNA, 25 nt, Artificial Sequence
  Synthetic Oligonucleotide
acugcagcguagacgcuuuguucag

SEQ ID NO: 13944 - RNA, 25 nt, Artificial Sequence
  Synthetic Oligonucleotide
acugcagcguagacguuuuguccaa

SEQ ID NO: 13945 - RNA, 25 nt, Artificial Sequence
  Synthetic Oligonucleotide
acugcagcguagacguuuuguccag

SEQ ID NO: 13946 - RNA, 25 nt, Artificial Sequence
  Synthetic Oligonucleotide
acugcagcguagacgcuucguccaa

SEQ ID NO: 13947 - RNA, 25 nt, Artificial Sequence
  Synthetic Oligonucleotide
acugcagcguagacgauuuguccaa

SEQ ID NO: 13948 - RNA, 25 nt, Artificial Sequence
  Synthetic Oligonucleotide
acugcagcguagacgguuuguccaa

SEQ ID NO: 13949 - RNA, 25 nt, Artificial Sequence
  Synthetic Oligonucleotide
acugcagcguacacgcuuuguccaa

SEQ ID NO: 13950 - RNA, 25 nt, Artificial Sequence
  Synthetic Oligonucleotide
acugcagcguauacgcuuuguccaa

SEQ ID NO: 13951 - RNA, 25 nt, Artificial Sequence
  Synthetic Oligonucleotide
acugcaacguagacgcuuuguccaa

SEQ ID NO: 13952 - RNA, 25 nt, Artificial Sequence
  Synthetic Oligonucleotide
acugcagcguaaacgcuuuguccag

SEQ ID NO: 13953 - RNA, 25 nt, Artificial Sequence
  Synthetic Oligonucleotide
acugcaacguagacgcuuuguucaa

SEQ ID NO: 13954 - RNA, 25 nt, Artificial Sequence
  Synthetic Oligonucleotide
acugcagcguauacgauuuguccaa

SEQ ID NO: 13955 - RNA, 25 nt, Artificial Sequence
  Synthetic Oligonucleotide
acugcaacguauacgcuuuguccaa

SEQ ID NO: 13956 - RNA, 25 nt, Artificial Sequence
  Synthetic Oligonucleotide
acugcaucguacacucuuuguccaa

SEQ ID NO: 13957 - RNA, 25 nt, Artificial Sequence
  Synthetic Oligonucleotide
gccagcacuacagcuaaggccaugg

SEQ ID NO: 13958 - RNA, 25 nt, Artificial Sequence
  Synthetic Oligonucleotide
gccagcacuacggcuaaggcuaugg

SEQ ID NO: 13959 - RNA, 25 nt, Artificial Sequence
  Synthetic Oligonucleotide
gccaguacuacagcuaaggcuaugg

SEQ ID NO: 13960 - RNA, 25 nt, Artificial Sequence
  Synthetic Oligonucleotide
gcuagcacuacagcuaaggcuaugg

SEQ ID NO: 13961 - RNA, 25 nt, Artificial Sequence
  Synthetic Oligonucleotide
gccagcacuacagcuaaagcuaugg

SEQ ID NO: 13962 - RNA, 25 nt, Artificial Sequence
  Synthetic Oligonucleotide
gccagcacuacagccaaggcuaugg

SEQ ID NO: 13963 - RNA, 25 nt, Artificial Sequence
  Synthetic Oligonucleotide
gccagcacuacagcgaaggcuaugg

SEQ ID NO: 13964 - RNA, 25 nt, Artificial Sequence
  Synthetic Oligonucleotide
gccagcacuaccgcuaaggcuaugg

SEQ ID NO: 13965 - RNA, 25 nt, Artificial Sequence
  Synthetic Oligonucleotide
gccagcacaacagcuaaggcuaugg

SEQ ID NO: 13966 - RNA, 25 nt, Artificial Sequence
  Synthetic Oligonucleotide
gccagcaccacagcuaaggcuaugg

SEQ ID NO: 13967 - RNA, 25 nt, Artificial Sequence
  Synthetic Oligonucleotide
gccagcaauacagcuaaggcuaugg

SEQ ID NO: 13968 - RNA, 25 nt, Artificial Sequence
  Synthetic Oligonucleotide
gcaagcacuacagcuaaggcuaugg

SEQ ID NO: 13969 - RNA, 25 nt, Artificial Sequence
  Synthetic Oligonucleotide
gccagcacuacggcuaaggccaugg

SEQ ID NO: 13970 - RNA, 25 nt, Artificial Sequence
  Synthetic Oligonucleotide
gcuagcacuacagcuaaggccaugg

SEQ ID NO: 13971 - RNA, 25 nt, Artificial Sequence
  Synthetic Oligonucleotide
gccagcacuacagcuaaagccaugg

SEQ ID NO: 13972 - RNA, 25 nt, Artificial Sequence
  Synthetic Oligonucleotide
gccagcacuacagcuaaagcgaugg

SEQ ID NO: 13973 - RNA, 25 nt, Artificial Sequence
  Synthetic Oligonucleotide
gccagcacaacagcuaaggccaugg

SEQ ID NO: 13974 - RNA, 25 nt, Artificial Sequence
  Synthetic Oligonucleotide
gccaguacuacggcuaaggcuaugg

SEQ ID NO: 13975 - RNA, 25 nt, Artificial Sequence
  Synthetic Oligonucleotide
gccagcauuacagcuaaagcuaugg

SEQ ID NO: 13976 - RNA, 25 nt, Artificial Sequence
  Synthetic Oligonucleotide
gcuagcaccacagcuaaggcuaugg

SEQ ID NO: 13977 - RNA, 25 nt, Artificial Sequence
  Synthetic Oligonucleotide
gccagcacuacagcuuaugcuaugg

SEQ ID NO: 13978 - RNA, 25 nt, Artificial Sequence
  Synthetic Oligonucleotide
gccagcaccacggcuaaggccaugg

SEQ ID NO: 13979 - RNA, 25 nt, Artificial Sequence
  Synthetic Oligonucleotide
gccagcacaacagcuaaagccaugg

SEQ ID NO: 13980 - RNA, 25 nt, Artificial Sequence
  Synthetic Oligonucleotide
cagcguagacgcuuuguccagaaug

SEQ ID NO: 13981 - RNA, 25 nt, Artificial Sequence
  Synthetic Oligonucleotide
cagcguagacgcuuuguccaaaacg

SEQ ID NO: 13982 - RNA, 25 nt, Artificial Sequence
  Synthetic Oligonucleotide
cagcguagacgcuuuguccagaacg

SEQ ID NO: 13983 - RNA, 25 nt, Artificial Sequence
  Synthetic Oligonucleotide
cagcguagacgcuuuguucaaaaug

SEQ ID NO: 13984 - RNA, 25 nt, Artificial Sequence
  Synthetic Oligonucleotide
cagcguagacguuuuguccaaaaug

SEQ ID NO: 13985 - RNA, 25 nt, Artificial Sequence
  Synthetic Oligonucleotide
cagcguagacgcuuuguucagaaug

SEQ ID NO: 13986 - RNA, 25 nt, Artificial Sequence
  Synthetic Oligonucleotide
cagcguagacguuuuguccagaaug

SEQ ID NO: 13987 - RNA, 25 nt, Artificial Sequence
  Synthetic Oligonucleotide
cagcguagacgcuucguccaaaaug

SEQ ID NO: 13988 - RNA, 25 nt, Artificial Sequence
  Synthetic Oligonucleotide
cagcguagacgauuuguccaaaaug

SEQ ID NO: 13989 - RNA, 25 nt, Artificial Sequence
  Synthetic Oligonucleotide
cagcguagacgguuuguccaaaaug

SEQ ID NO: 13990 - RNA, 25 nt, Artificial Sequence
  Synthetic Oligonucleotide
cagcguacacgcuuuguccaaaaug

SEQ ID NO: 13991 - RNA, 25 nt, Artificial Sequence
  Synthetic Oligonucleotide
cagcguauacgcuuuguccaaaaug

SEQ ID NO: 13992 - RNA, 25 nt, Artificial Sequence
  Synthetic Oligonucleotide
caacguagacgcuuuguccaaaaug

SEQ ID NO: 13993 - RNA, 25 nt, Artificial Sequence
  Synthetic Oligonucleotide
cagcguaaacgcuuuguccagaaug

SEQ ID NO: 13994 - RNA, 25 nt, Artificial Sequence
  Synthetic Oligonucleotide
caacguagacgcuuuguucaaaaug

SEQ ID NO: 13995 - RNA, 25 nt, Artificial Sequence
  Synthetic Oligonucleotide
cagcguauacgauuuguccaaaaug

SEQ ID NO: 13996 - RNA, 25 nt, Artificial Sequence
  Synthetic Oligonucleotide
caacguauacgcuuuguccaaaaug

SEQ ID NO: 13997 - RNA, 25 nt, Artificial Sequence
  Synthetic Oligonucleotide
caucguacacucuuuguccaaaaug

SEQ ID NO: 13998 - RNA, 25 nt, Artificial Sequence
  Synthetic Oligonucleotide
ccagcacuacagcuaaggccaugga

SEQ ID NO: 13999 - RNA, 25 nt, Artificial Sequence
  Synthetic Oligonucleotide
ccagcacuacggcuaaggcuaugga

SEQ ID NO: 14000 - RNA, 25 nt, Artificial Sequence
  Synthetic Oligonucleotide
ccaguacuacagcuaaggcuaugga

SEQ ID NO: 14001 - RNA, 25 nt, Artificial Sequence
  Synthetic Oligonucleotide
cuagcacuacagcuaaggcuaugga

SEQ ID NO: 14002 - RNA, 25 nt, Artificial Sequence
  Synthetic Oligonucleotide
ccagcacuacagcuaaagcuaugga

SEQ ID NO: 14003 - RNA, 25 nt, Artificial Sequence
  Synthetic Oligonucleotide
ccagcacuacagccaaggcuaugga

SEQ ID NO: 14004 - RNA, 25 nt, Artificial Sequence
  Synthetic Oligonucleotide
ccagcacuacagcgaaggcuaugga

SEQ ID NO: 14005 - RNA, 25 nt, Artificial Sequence
  Synthetic Oligonucleotide
ccagcacuaccgcuaaggcuaugga

SEQ ID NO: 14006 - RNA, 25 nt, Artificial Sequence
  Synthetic Oligonucleotide
ccagcacaacagcuaaggcuaugga

SEQ ID NO: 14007 - RNA, 25 nt, Artificial Sequence
  Synthetic Oligonucleotide
ccagcaccacagcuaaggcuaugga

SEQ ID NO: 14008 - RNA, 25 nt, Artificial Sequence
  Synthetic Oligonucleotide
ccagcaauacagcuaaggcuaugga

SEQ ID NO: 14009 - RNA, 25 nt, Artificial Sequence
  Synthetic Oligonucleotide
caagcacuacagcuaaggcuaugga

SEQ ID NO: 14010 - RNA, 25 nt, Artificial Sequence
  Synthetic Oligonucleotide
ccagcacuacggcuaaggccaugga

SEQ ID NO: 14011 - RNA, 25 nt, Artificial Sequence
  Synthetic Oligonucleotide
cuagcacuacagcuaaggccaugga

SEQ ID NO: 14012 - RNA, 25 nt, Artificial Sequence
  Synthetic Oligonucleotide
ccagcacuacagcuaaagccaugga

SEQ ID NO: 14013 - RNA, 25 nt, Artificial Sequence
  Synthetic Oligonucleotide
ccagcacuacagcuaaagcgaugga

SEQ ID NO: 14014 - RNA, 25 nt, Artificial Sequence
  Synthetic Oligonucleotide
ccagcacaacagcuaaggccaugga

SEQ ID NO: 14015 - RNA, 25 nt, Artificial Sequence
  Synthetic Oligonucleotide
ccaguacuacggcuaaggcuaugga

SEQ ID NO: 14016 - RNA, 25 nt, Artificial Sequence
  Synthetic Oligonucleotide
ccagcauuacagcuaaagcuaugga

SEQ ID NO: 14017 - RNA, 25 nt, Artificial Sequence
  Synthetic Oligonucleotide
cuagcaccacagcuaaggcuaugga

SEQ ID NO: 14018 - RNA, 25 nt, Artificial Sequence
  Synthetic Oligonucleotide
ccagcacuacagcuuaugcuaugga

SEQ ID NO: 14019 - RNA, 25 nt, Artificial Sequence
  Synthetic Oligonucleotide
ccagcaccacggcuaaggccaugga

SEQ ID NO: 14020 - RNA, 25 nt, Artificial Sequence
  Synthetic Oligonucleotide
ccagcacaacagcuaaagccaugga

SEQ ID NO: 14021 - RNA, 25 nt, Artificial Sequence
  Synthetic Oligonucleotide
gcagcguagacgcuuuguccagaau

SEQ ID NO: 14022 - RNA, 25 nt, Artificial Sequence
  Synthetic Oligonucleotide
gcagcguagacgcuuuguccaaaac

SEQ ID NO: 14023 - RNA, 25 nt, Artificial Sequence
  Synthetic Oligonucleotide
gcagcguagacgcuuuguccagaac

SEQ ID NO: 14024 - RNA, 25 nt, Artificial Sequence
  Synthetic Oligonucleotide
gcagcguagacgcuuuguucaaaau

SEQ ID NO: 14025 - RNA, 25 nt, Artificial Sequence
  Synthetic Oligonucleotide
gcagcguagacguuuuguccaaaau

SEQ ID NO: 14026 - RNA, 25 nt, Artificial Sequence
  Synthetic Oligonucleotide
gcagcguagacgcuuuguucagaau

SEQ ID NO: 14027 - RNA, 25 nt, Artificial Sequence
  Synthetic Oligonucleotide
gcagcguagacguuuuguccagaau

SEQ ID NO: 14028 - RNA, 25 nt, Artificial Sequence
  Synthetic Oligonucleotide
gcagcguagacgcuucguccaaaau

SEQ ID NO: 14029 - RNA, 25 nt, Artificial Sequence
  Synthetic Oligonucleotide
gcagcguagacgauuuguccaaaau

SEQ ID NO: 14030 - RNA, 25 nt, Artificial Sequence
  Synthetic Oligonucleotide
gcagcguagacgguuuguccaaaau

SEQ ID NO: 14031 - RNA, 25 nt, Artificial Sequence
  Synthetic Oligonucleotide
gcagcguacacgcuuuguccaaaau

SEQ ID NO: 14032 - RNA, 25 nt, Artificial Sequence
  Synthetic Oligonucleotide
gcagcguauacgcuuuguccaaaau

SEQ ID NO: 14033 - RNA, 25 nt, Artificial Sequence
  Synthetic Oligonucleotide
gcaacguagacgcuuuguccaaaau

SEQ ID NO: 14034 - RNA, 25 nt, Artificial Sequence
  Synthetic Oligonucleotide
gcagcguaaacgcuuuguccagaau

SEQ ID NO: 14035 - RNA, 25 nt, Artificial Sequence
  Synthetic Oligonucleotide
gcaacguagacgcuuuguucaaaau

SEQ ID NO: 14036 - RNA, 25 nt, Artificial Sequence
  Synthetic Oligonucleotide
gcagcguauacgauuuguccaaaau

SEQ ID NO: 14037 - RNA, 25 nt, Artificial Sequence
  Synthetic Oligonucleotide
gcaacguauacgcuuuguccaaaau

SEQ ID NO: 14038 - RNA, 25 nt, Artificial Sequence
  Synthetic Oligonucleotide
gcaucguacacucuuuguccaaaau

SEQ ID NO: 14039 - RNA, 25 nt, Artificial Sequence
  Synthetic Oligonucleotide
agcguagacgcuuuguccaaaaugu

SEQ ID NO: 14040 - RNA, 25 nt, Artificial Sequence
  Synthetic Oligonucleotide
agcguagacgcuuuguccagaaugc

SEQ ID NO: 14041 - RNA, 25 nt, Artificial Sequence
  Synthetic Oligonucleotide
agcguagacgcuuuguccaaaacgc

SEQ ID NO: 14042 - RNA, 25 nt, Artificial Sequence
  Synthetic Oligonucleotide
agcguagacgcuuuguccagaacgc

SEQ ID NO: 14043 - RNA, 25 nt, Artificial Sequence
  Synthetic Oligonucleotide
agcguagacgcuuuguucaaaaugc

SEQ ID NO: 14044 - RNA, 25 nt, Artificial Sequence
  Synthetic Oligonucleotide
agcguagacguuuuguccaaaaugc

SEQ ID NO: 14045 - RNA, 25 nt, Artificial Sequence
  Synthetic Oligonucleotide
agcguagacgcuuuguucagaaugc

SEQ ID NO: 14046 - RNA, 25 nt, Artificial Sequence
  Synthetic Oligonucleotide
agcguagacguuuuguccagaaugc

SEQ ID NO: 14047 - RNA, 25 nt, Artificial Sequence
  Synthetic Oligonucleotide
agcguagacgcuucguccaaaaugc

SEQ ID NO: 14048 - RNA, 25 nt, Artificial Sequence
  Synthetic Oligonucleotide
agcguagacgauuuguccaaaaugc

SEQ ID NO: 14049 - RNA, 25 nt, Artificial Sequence
  Synthetic Oligonucleotide
agcguagacgguuuguccaaaaugc

SEQ ID NO: 14050 - RNA, 25 nt, Artificial Sequence
  Synthetic Oligonucleotide
agcguacacgcuuuguccaaaaugc

SEQ ID NO: 14051 - RNA, 25 nt, Artificial Sequence
  Synthetic Oligonucleotide
agcguauacgcuuuguccaaaaugc

SEQ ID NO: 14052 - RNA, 25 nt, Artificial Sequence
  Synthetic Oligonucleotide
aacguagacgcuuuguccaaaaugc

SEQ ID NO: 14053 - RNA, 25 nt, Artificial Sequence
  Synthetic Oligonucleotide
agcguaaacgcuuuguccagaaugc

SEQ ID NO: 14054 - RNA, 25 nt, Artificial Sequence
  Synthetic Oligonucleotide
aacguagacgcuuuguucaaaaugc

SEQ ID NO: 14055 - RNA, 25 nt, Artificial Sequence
  Synthetic Oligonucleotide
agcguauacgauuuguccaaaaugc

SEQ ID NO: 14056 - RNA, 25 nt, Artificial Sequence
  Synthetic Oligonucleotide
aacguauacgcuuuguccaaaaugc

SEQ ID NO: 14057 - RNA, 25 nt, Artificial Sequence
  Synthetic Oligonucleotide
aucguacacucuuuguccaaaaugc

SEQ ID NO: 14058 - RNA, 25 nt, Artificial Sequence
  Synthetic Oligonucleotide
ucaguuauucugcuggugcgcuugc

SEQ ID NO: 14059 - RNA, 25 nt, Artificial Sequence
  Synthetic Oligonucleotide
ucaguuauucugcuggugcacuagc

SEQ ID NO: 14060 - RNA, 25 nt, Artificial Sequence
  Synthetic Oligonucleotide
ucaguuauucugcuggugcacucgc

SEQ ID NO: 14061 - RNA, 25 nt, Artificial Sequence
  Synthetic Oligonucleotide
ucgguuauucugcuggugcacuugc

SEQ ID NO: 14062 - RNA, 25 nt, Artificial Sequence
  Synthetic Oligonucleotide
uuaguuauucugcuggugcacuugc

SEQ ID NO: 14063 - RNA, 25 nt, Artificial Sequence
  Synthetic Oligonucleotide
ucaguuauucugcuggagcacuugc

SEQ ID NO: 14064 - RNA, 25 nt, Artificial Sequence
  Synthetic Oligonucleotide
ucaguuauucugcuggcgcacuugc

SEQ ID NO: 14065 - RNA, 25 nt, Artificial Sequence
  Synthetic Oligonucleotide
ucaguuauucugccggugcacuugc

SEQ ID NO: 14066 - RNA, 25 nt, Artificial Sequence
  Synthetic Oligonucleotide
ucaguuauuccgcuggugcacuugc

SEQ ID NO: 14067 - RNA, 25 nt, Artificial Sequence
  Synthetic Oligonucleotide
ucaguuauucggcuggugcacuugc

SEQ ID NO: 14068 - RNA, 25 nt, Artificial Sequence
  Synthetic Oligonucleotide
ucaguuacucugcuggugcacuugc

SEQ ID NO: 14069 - RNA, 25 nt, Artificial Sequence
  Synthetic Oligonucleotide
ucagcuauucugcuggugcacuugc

SEQ ID NO: 14070 - RNA, 25 nt, Artificial Sequence
  Synthetic Oligonucleotide
ucaguuauucaacuggugcacuugc

SEQ ID NO: 14071 - RNA, 25 nt, Artificial Sequence
  Synthetic Oligonucleotide
ucaguuacucaacuggugcgcuugc

SEQ ID NO: 14072 - RNA, 25 nt, Artificial Sequence
  Synthetic Oligonucleotide
gcacuacagcuaaggcuauggaaca

SEQ ID NO: 14073 - RNA, 25 nt, Artificial Sequence
  Synthetic Oligonucleotide
gcacuacggcuaaggcuauggagca

SEQ ID NO: 14074 - RNA, 25 nt, Artificial Sequence
  Synthetic Oligonucleotide
guacuacagcuaaggcuauggagca

SEQ ID NO: 14075 - RNA, 25 nt, Artificial Sequence
  Synthetic Oligonucleotide
gcacuacagcuaaggccauggagca

SEQ ID NO: 14076 - RNA, 25 nt, Artificial Sequence
  Synthetic Oligonucleotide
gcacuacagcuaaagcuauggagca

SEQ ID NO: 14077 - RNA, 25 nt, Artificial Sequence
  Synthetic Oligonucleotide
gcacuacagccaaggcuauggagca

SEQ ID NO: 14078 - RNA, 25 nt, Artificial Sequence
  Synthetic Oligonucleotide
gcacuacagcgaaggcuauggagca

SEQ ID NO: 14079 - RNA, 25 nt, Artificial Sequence
  Synthetic Oligonucleotide
gcacuaccgcuaaggcuauggagca

SEQ ID NO: 14080 - RNA, 25 nt, Artificial Sequence
  Synthetic Oligonucleotide
gcacaacagcuaaggcuauggagca

SEQ ID NO: 14081 - RNA, 25 nt, Artificial Sequence
  Synthetic Oligonucleotide
gcaccacagcuaaggcuauggagca

SEQ ID NO: 14082 - RNA, 25 nt, Artificial Sequence
  Synthetic Oligonucleotide
gcaauacagcuaaggcuauggagca

SEQ ID NO: 14083 - RNA, 25 nt, Artificial Sequence
  Synthetic Oligonucleotide
gcacuacagcuaaggccauggaaca

SEQ ID NO: 14084 - RNA, 25 nt, Artificial Sequence
  Synthetic Oligonucleotide
gcacuacagccaaggcuauggaaca

SEQ ID NO: 14085 - RNA, 25 nt, Artificial Sequence
  Synthetic Oligonucleotide
gcaccacagcuaaggcuauggaaca

SEQ ID NO: 14086 - RNA, 25 nt, Artificial Sequence
  Synthetic Oligonucleotide
guacuacggcuaaggcuauggagca

SEQ ID NO: 14087 - RNA, 25 nt, Artificial Sequence
  Synthetic Oligonucleotide
gcacuacggcuaaggccauggagca

SEQ ID NO: 14088 - RNA, 25 nt, Artificial Sequence
  Synthetic Oligonucleotide
gcauuacagcuaaagcuauggagca

SEQ ID NO: 14089 - RNA, 25 nt, Artificial Sequence
  Synthetic Oligonucleotide
gcacuacagcuaaagccauggagca

SEQ ID NO: 14090 - RNA, 25 nt, Artificial Sequence
  Synthetic Oligonucleotide
gcacuacagcuaaagcgauggagca

SEQ ID NO: 14091 - RNA, 25 nt, Artificial Sequence
  Synthetic Oligonucleotide
gcacuacagcuuaugcuauggagca

SEQ ID NO: 14092 - RNA, 25 nt, Artificial Sequence
  Synthetic Oligonucleotide
gcacaacagcuaaggccauggaaca

SEQ ID NO: 14093 - RNA, 25 nt, Artificial Sequence
  Synthetic Oligonucleotide
gcaccacggcuaaggccauggagca

SEQ ID NO: 14094 - RNA, 25 nt, Artificial Sequence
  Synthetic Oligonucleotide
gcacaacagcuaaagccauggaaca

SEQ ID NO: 14095 - RNA, 25 nt, Artificial Sequence
  Synthetic Oligonucleotide
agcacuacagcuaaggcuauggaac

SEQ ID NO: 14096 - RNA, 25 nt, Artificial Sequence
  Synthetic Oligonucleotide
agcacuacggcuaaggcuauggagc

SEQ ID NO: 14097 - RNA, 25 nt, Artificial Sequence
  Synthetic Oligonucleotide
aguacuacagcuaaggcuauggagc

SEQ ID NO: 14098 - RNA, 25 nt, Artificial Sequence
  Synthetic Oligonucleotide
agcacuacagcuaaggccauggagc

SEQ ID NO: 14099 - RNA, 25 nt, Artificial Sequence
  Synthetic Oligonucleotide
agcacuacagcuaaagcuauggagc

SEQ ID NO: 14100 - RNA, 25 nt, Artificial Sequence
  Synthetic Oligonucleotide
agcacuacagccaaggcuauggagc

SEQ ID NO: 14101 - RNA, 25 nt, Artificial Sequence
  Synthetic Oligonucleotide
agcacuacagcgaaggcuauggagc

SEQ ID NO: 14102 - RNA, 25 nt, Artificial Sequence
  Synthetic Oligonucleotide
agcacuaccgcuaaggcuauggagc

SEQ ID NO: 14103 - RNA, 25 nt, Artificial Sequence
  Synthetic Oligonucleotide
agcacaacagcuaaggcuauggagc

SEQ ID NO: 14104 - RNA, 25 nt, Artificial Sequence
  Synthetic Oligonucleotide
agcaccacagcuaaggcuauggagc

SEQ ID NO: 14105 - RNA, 25 nt, Artificial Sequence
  Synthetic Oligonucleotide
agcaauacagcuaaggcuauggagc

SEQ ID NO: 14106 - RNA, 25 nt, Artificial Sequence
  Synthetic Oligonucleotide
agcacuacagcuaaggccauggaac

SEQ ID NO: 14107 - RNA, 25 nt, Artificial Sequence
  Synthetic Oligonucleotide
agcacuacagccaaggcuauggaac

SEQ ID NO: 14108 - RNA, 25 nt, Artificial Sequence
  Synthetic Oligonucleotide
agcaccacagcuaaggcuauggaac

SEQ ID NO: 14109 - RNA, 25 nt, Artificial Sequence
  Synthetic Oligonucleotide
aguacuacggcuaaggcuauggagc

SEQ ID NO: 14110 - RNA, 25 nt, Artificial Sequence
  Synthetic Oligonucleotide
agcacuacggcuaaggccauggagc

SEQ ID NO: 14111 - RNA, 25 nt, Artificial Sequence
  Synthetic Oligonucleotide
agcauuacagcuaaagcuauggagc

SEQ ID NO: 14112 - RNA, 25 nt, Artificial Sequence
  Synthetic Oligonucleotide
agcacuacagcuaaagccauggagc

SEQ ID NO: 14113 - RNA, 25 nt, Artificial Sequence
  Synthetic Oligonucleotide
agcacuacagcuaaagcgauggagc

SEQ ID NO: 14114 - RNA, 25 nt, Artificial Sequence
  Synthetic Oligonucleotide
agcacuacagcuuaugcuauggagc

SEQ ID NO: 14115 - RNA, 25 nt, Artificial Sequence
  Synthetic Oligonucleotide
agcacaacagcuaaggccauggaac

SEQ ID NO: 14116 - RNA, 25 nt, Artificial Sequence
  Synthetic Oligonucleotide
agcaccacggcuaaggccauggagc

SEQ ID NO: 14117 - RNA, 25 nt, Artificial Sequence
  Synthetic Oligonucleotide
agcacaacagcuaaagccauggaac

SEQ ID NO: 14118 - RNA, 25 nt, Artificial Sequence
  Synthetic Oligonucleotide
cucaguuauucugcuggugcgcuug

SEQ ID NO: 14119 - RNA, 25 nt, Artificial Sequence
  Synthetic Oligonucleotide
cucaguuauucugcuggugcacuag

SEQ ID NO: 14120 - RNA, 25 nt, Artificial Sequence
  Synthetic Oligonucleotide
cucaguuauucugcuggugcacucg

SEQ ID NO: 14121 - RNA, 25 nt, Artificial Sequence
  Synthetic Oligonucleotide
cucgguuauucugcuggugcacuug

SEQ ID NO: 14122 - RNA, 25 nt, Artificial Sequence
  Synthetic Oligonucleotide
cuuaguuauucugcuggugcacuug

SEQ ID NO: 14123 - RNA, 25 nt, Artificial Sequence
  Synthetic Oligonucleotide
uucaguuauucugcuggugcacuug

SEQ ID NO: 14124 - RNA, 25 nt, Artificial Sequence
  Synthetic Oligonucleotide
cucaguuauucugcuggagcacuug

SEQ ID NO: 14125 - RNA, 25 nt, Artificial Sequence
  Synthetic Oligonucleotide
cucaguuauucugcuggcgcacuug

SEQ ID NO: 14126 - RNA, 25 nt, Artificial Sequence
  Synthetic Oligonucleotide
cucaguuauucugccggugcacuug

SEQ ID NO: 14127 - RNA, 25 nt, Artificial Sequence
  Synthetic Oligonucleotide
cucaguuauuccgcuggugcacuug

SEQ ID NO: 14128 - RNA, 25 nt, Artificial Sequence
  Synthetic Oligonucleotide
cucaguuauucggcuggugcacuug

SEQ ID NO: 14129 - RNA, 25 nt, Artificial Sequence
  Synthetic Oligonucleotide
cucaguuacucugcuggugcacuug

SEQ ID NO: 14130 - RNA, 25 nt, Artificial Sequence
  Synthetic Oligonucleotide
cucagcuauucugcuggugcacuug

SEQ ID NO: 14131 - RNA, 25 nt, Artificial Sequence
  Synthetic Oligonucleotide
cucaguuauucaacuggugcacuug

SEQ ID NO: 14132 - RNA, 25 nt, Artificial Sequence
  Synthetic Oligonucleotide
cucaguuacucaacuggugcgcuug

SEQ ID NO: 14133 - RNA, 25 nt, Artificial Sequence
  Synthetic Oligonucleotide
cagcacuacagcuaaggcuauggaa

SEQ ID NO: 14134 - RNA, 25 nt, Artificial Sequence
  Synthetic Oligonucleotide
cagcacuacggcuaaggcuauggag

SEQ ID NO: 14135 - RNA, 25 nt, Artificial Sequence
  Synthetic Oligonucleotide
caguacuacagcuaaggcuauggag

SEQ ID NO: 14136 - RNA, 25 nt, Artificial Sequence
  Synthetic Oligonucleotide
cagcacuacagcuaaggccauggag

SEQ ID NO: 14137 - RNA, 25 nt, Artificial Sequence
  Synthetic Oligonucleotide
cagcacuacagcuaaagcuauggag

SEQ ID NO: 14138 - RNA, 25 nt, Artificial Sequence
  Synthetic Oligonucleotide
cagcacuacagccaaggcuauggag

SEQ ID NO: 14139 - RNA, 25 nt, Artificial Sequence
  Synthetic Oligonucleotide
cagcacuacagcgaaggcuauggag

SEQ ID NO: 14140 - RNA, 25 nt, Artificial Sequence
  Synthetic Oligonucleotide
cagcacuaccgcuaaggcuauggag

SEQ ID NO: 14141 - RNA, 25 nt, Artificial Sequence
  Synthetic Oligonucleotide
cagcacaacagcuaaggcuauggag

SEQ ID NO: 14142 - RNA, 25 nt, Artificial Sequence
  Synthetic Oligonucleotide
cagcaccacagcuaaggcuauggag

SEQ ID NO: 14143 - RNA, 25 nt, Artificial Sequence
  Synthetic Oligonucleotide
cagcaauacagcuaaggcuauggag

SEQ ID NO: 14144 - RNA, 25 nt, Artificial Sequence
  Synthetic Oligonucleotide
aagcacuacagcuaaggcuauggag

SEQ ID NO: 14145 - RNA, 25 nt, Artificial Sequence
  Synthetic Oligonucleotide
uagcacuacagcuaaggcuauggaa

SEQ ID NO: 14146 - RNA, 25 nt, Artificial Sequence
  Synthetic Oligonucleotide
cagcacuacagccaaggcuauggaa

SEQ ID NO: 14147 - RNA, 25 nt, Artificial Sequence
  Synthetic Oligonucleotide
caguacuacggcuaaggcuauggag

SEQ ID NO: 14148 - RNA, 25 nt, Artificial Sequence
  Synthetic Oligonucleotide
cagcacuacggcuaaggccauggag

SEQ ID NO: 14149 - RNA, 25 nt, Artificial Sequence
  Synthetic Oligonucleotide
cagcauuacagcuaaagcuauggag

SEQ ID NO: 14150 - RNA, 25 nt, Artificial Sequence
  Synthetic Oligonucleotide
cagcacuacagcuaaagccauggag

SEQ ID NO: 14151 - RNA, 25 nt, Artificial Sequence
  Synthetic Oligonucleotide
cagcacuacagcuaaagcgauggag

SEQ ID NO: 14152 - RNA, 25 nt, Artificial Sequence
  Synthetic Oligonucleotide
cagcacuacagcuuaugcuauggag

SEQ ID NO: 14153 - RNA, 25 nt, Artificial Sequence
  Synthetic Oligonucleotide
uagcacuacagcuaaggccauggaa

SEQ ID NO: 14154 - RNA, 25 nt, Artificial Sequence
  Synthetic Oligonucleotide
uagcaccacagcuaaggcuauggaa

SEQ ID NO: 14155 - RNA, 25 nt, Artificial Sequence
  Synthetic Oligonucleotide
cagcacaacagcuaaggccauggaa

SEQ ID NO: 14156 - RNA, 25 nt, Artificial Sequence
  Synthetic Oligonucleotide
cagcaccacggcuaaggccauggag

SEQ ID NO: 14157 - RNA, 25 nt, Artificial Sequence
  Synthetic Oligonucleotide
cagcacaacagcuaaagccauggaa

SEQ ID NO: 14158 - RNA, 25 nt, Artificial Sequence
  Synthetic Oligonucleotide
gcguagacgcuuuguccaaaaugcu

SEQ ID NO: 14159 - RNA, 25 nt, Artificial Sequence
  Synthetic Oligonucleotide
gcguagacgcuuuguccaaaauguc

SEQ ID NO: 14160 - RNA, 25 nt, Artificial Sequence
  Synthetic Oligonucleotide
gcguagacgcuuuguccaaaaugca

SEQ ID NO: 14161 - RNA, 25 nt, Artificial Sequence
  Synthetic Oligonucleotide
gcguagacgcuuuguccaaaacgcc

SEQ ID NO: 14162 - RNA, 25 nt, Artificial Sequence
  Synthetic Oligonucleotide
gcguagacgcuuuguccagaaugcc

SEQ ID NO: 14163 - RNA, 25 nt, Artificial Sequence
  Synthetic Oligonucleotide
gcguagacgcuuuguucaaaaugcc

SEQ ID NO: 14164 - RNA, 25 nt, Artificial Sequence
  Synthetic Oligonucleotide
gcguagacguuuuguccaaaaugcc

SEQ ID NO: 14165 - RNA, 25 nt, Artificial Sequence
  Synthetic Oligonucleotide
gcguagacgcuucguccaaaaugcc

SEQ ID NO: 14166 - RNA, 25 nt, Artificial Sequence
  Synthetic Oligonucleotide
gcguagacgauuuguccaaaaugcc

SEQ ID NO: 14167 - RNA, 25 nt, Artificial Sequence
  Synthetic Oligonucleotide
gcguagacgguuuguccaaaaugcc

SEQ ID NO: 14168 - RNA, 25 nt, Artificial Sequence
  Synthetic Oligonucleotide
gcguacacgcuuuguccaaaaugcc

SEQ ID NO: 14169 - RNA, 25 nt, Artificial Sequence
  Synthetic Oligonucleotide
gcguauacgcuuuguccaaaaugcc

SEQ ID NO: 14170 - RNA, 25 nt, Artificial Sequence
  Synthetic Oligonucleotide
acguagacgcuuuguccaaaaugcc

SEQ ID NO: 14171 - RNA, 25 nt, Artificial Sequence
  Synthetic Oligonucleotide
gcguagacgcuuuguccagaacgcc

SEQ ID NO: 14172 - RNA, 25 nt, Artificial Sequence
  Synthetic Oligonucleotide
gcguagacgcuuuguccagaacgcu

SEQ ID NO: 14173 - RNA, 25 nt, Artificial Sequence
  Synthetic Oligonucleotide
acguagacgcuuuguccaaaaugca

SEQ ID NO: 14174 - RNA, 25 nt, Artificial Sequence
  Synthetic Oligonucleotide
gcguagacgcuuuguucagaaugcc

SEQ ID NO: 14175 - RNA, 25 nt, Artificial Sequence
  Synthetic Oligonucleotide
gcguagacguuuuguccagaaugcc

SEQ ID NO: 14176 - RNA, 25 nt, Artificial Sequence
  Synthetic Oligonucleotide
gcguaaacgcuuuguccagaaugcc

SEQ ID NO: 14177 - RNA, 25 nt, Artificial Sequence
  Synthetic Oligonucleotide
acguagacgcuuuguucaaaaugcc

SEQ ID NO: 14178 - RNA, 25 nt, Artificial Sequence
  Synthetic Oligonucleotide
gcguauacgauuuguccaaaaugcc

SEQ ID NO: 14179 - RNA, 25 nt, Artificial Sequence
  Synthetic Oligonucleotide
acguauacgcuuuguccaaaaugcc

SEQ ID NO: 14180 - RNA, 25 nt, Artificial Sequence
  Synthetic Oligonucleotide
ucguacacucuuuguccaaaaugcc

SEQ ID NO: 14181 - RNA, 25 nt, Artificial Sequence
  Synthetic Oligonucleotide
uauucugcuggugcacuugcuaguu

SEQ ID NO: 14182 - RNA, 25 nt, Artificial Sequence
  Synthetic Oligonucleotide
uauucugcuggugcacuugccagcu

SEQ ID NO: 14183 - RNA, 25 nt, Artificial Sequence
  Synthetic Oligonucleotide
uauucugcuggugcgcuugccaguu

SEQ ID NO: 14184 - RNA, 25 nt, Artificial Sequence
  Synthetic Oligonucleotide
uauucugcuggugcacuagccaguu

SEQ ID NO: 14185 - RNA, 25 nt, Artificial Sequence
  Synthetic Oligonucleotide
uauucugcuggugcacucgccaguu

SEQ ID NO: 14186 - RNA, 25 nt, Artificial Sequence
  Synthetic Oligonucleotide
uauucugcuggagcacuugccaguu

SEQ ID NO: 14187 - RNA, 25 nt, Artificial Sequence
  Synthetic Oligonucleotide
uauucugcuggcgcacuugccaguu

SEQ ID NO: 14188 - RNA, 25 nt, Artificial Sequence
  Synthetic Oligonucleotide
uauucugccggugcacuugccaguu

SEQ ID NO: 14189 - RNA, 25 nt, Artificial Sequence
  Synthetic Oligonucleotide
uauuccgcuggugcacuugccaguu

SEQ ID NO: 14190 - RNA, 25 nt, Artificial Sequence
  Synthetic Oligonucleotide
uauucggcuggugcacuugccaguu

SEQ ID NO: 14191 - RNA, 25 nt, Artificial Sequence
  Synthetic Oligonucleotide
uacucugcuggugcacuugccaguu

SEQ ID NO: 14192 - RNA, 25 nt, Artificial Sequence
  Synthetic Oligonucleotide
uauucugcuggugcgcuugccagcu

SEQ ID NO: 14193 - RNA, 25 nt, Artificial Sequence
  Synthetic Oligonucleotide
uauucaacuggugcacuugccaguu

SEQ ID NO: 14194 - RNA, 25 nt, Artificial Sequence
  Synthetic Oligonucleotide
uacucaacuggugcacuugccaguu

SEQ ID NO: 14195 - RNA, 25 nt, Artificial Sequence
  Synthetic Oligonucleotide
uacucaacuggugcacuugccagcu

SEQ ID NO: 14196 - RNA, 25 nt, Artificial Sequence
  Synthetic Oligonucleotide
auucugcuggugcacuugcuaguug

SEQ ID NO: 14197 - RNA, 25 nt, Artificial Sequence
  Synthetic Oligonucleotide
auucugcuggugcacuugccagcug

SEQ ID NO: 14198 - RNA, 25 nt, Artificial Sequence
  Synthetic Oligonucleotide
auucugcuggugcgcuugccaguug

SEQ ID NO: 14199 - RNA, 25 nt, Artificial Sequence
  Synthetic Oligonucleotide
auucugcuggugcacuagccaguug

SEQ ID NO: 14200 - RNA, 25 nt, Artificial Sequence
  Synthetic Oligonucleotide
auucugcuggugcacucgccaguug

SEQ ID NO: 14201 - RNA, 25 nt, Artificial Sequence
  Synthetic Oligonucleotide
auucugcuggagcacuugccaguug

SEQ ID NO: 14202 - RNA, 25 nt, Artificial Sequence
  Synthetic Oligonucleotide
auucugcuggcgcacuugccaguug

SEQ ID NO: 14203 - RNA, 25 nt, Artificial Sequence
  Synthetic Oligonucleotide
auucugccggugcacuugccaguug

SEQ ID NO: 14204 - RNA, 25 nt, Artificial Sequence
  Synthetic Oligonucleotide
auuccgcuggugcacuugccaguug

SEQ ID NO: 14205 - RNA, 25 nt, Artificial Sequence
  Synthetic Oligonucleotide
auucggcuggugcacuugccaguug

SEQ ID NO: 14206 - RNA, 25 nt, Artificial Sequence
  Synthetic Oligonucleotide
acucugcuggugcacuugccaguug

SEQ ID NO: 14207 - RNA, 25 nt, Artificial Sequence
  Synthetic Oligonucleotide
auucugcuggugcgcuugccagcug

SEQ ID NO: 14208 - RNA, 25 nt, Artificial Sequence
  Synthetic Oligonucleotide
auucaacuggugcacuugccaguug

SEQ ID NO: 14209 - RNA, 25 nt, Artificial Sequence
  Synthetic Oligonucleotide
acucaacuggugcacuugccaguug

SEQ ID NO: 14210 - RNA, 25 nt, Artificial Sequence
  Synthetic Oligonucleotide
acucaacuggugcacuugccagcug

SEQ ID NO: 14211 - RNA, 25 nt, Artificial Sequence
  Synthetic Oligonucleotide
uggccagcacuacagcuaaggccau

SEQ ID NO: 14212 - RNA, 25 nt, Artificial Sequence
  Synthetic Oligonucleotide
uggccagcacuacagcuaaagcuau

SEQ ID NO: 14213 - RNA, 25 nt, Artificial Sequence
  Synthetic Oligonucleotide
uggccagcacuacagcuaaagccau

SEQ ID NO: 14214 - RNA, 25 nt, Artificial Sequence
  Synthetic Oligonucleotide
uggccagcacuacagcuaaagcgau

SEQ ID NO: 14215 - RNA, 25 nt, Artificial Sequence
  Synthetic Oligonucleotide
uggccagcacuacggcuaaggcuau

SEQ ID NO: 14216 - RNA, 25 nt, Artificial Sequence
  Synthetic Oligonucleotide
uggccaguacuacagcuaaggcuau

SEQ ID NO: 14217 - RNA, 25 nt, Artificial Sequence
  Synthetic Oligonucleotide
uggccagcacuacagccaaggcuau

SEQ ID NO: 14218 - RNA, 25 nt, Artificial Sequence
  Synthetic Oligonucleotide
uggccagcacuacagcgaaggcuau

SEQ ID NO: 14219 - RNA, 25 nt, Artificial Sequence
  Synthetic Oligonucleotide
uggccagcacuaccgcuaaggcuau

SEQ ID NO: 14220 - RNA, 25 nt, Artificial Sequence
  Synthetic Oligonucleotide
uggccagcacaacagcuaaggcuau

SEQ ID NO: 14221 - RNA, 25 nt, Artificial Sequence
  Synthetic Oligonucleotide
uggccagcaccacagcuaaggcuau

SEQ ID NO: 14222 - RNA, 25 nt, Artificial Sequence
  Synthetic Oligonucleotide
uggccagcaauacagcuaaggcuau

SEQ ID NO: 14223 - RNA, 25 nt, Artificial Sequence
  Synthetic Oligonucleotide
uggcaagcacuacagcuaaggcuau

SEQ ID NO: 14224 - RNA, 25 nt, Artificial Sequence
  Synthetic Oligonucleotide
uagccagcacuacagcuaaggcuau

SEQ ID NO: 14225 - RNA, 25 nt, Artificial Sequence
  Synthetic Oligonucleotide
uggccagcacuacggcuaaggccau

SEQ ID NO: 14226 - RNA, 25 nt, Artificial Sequence
  Synthetic Oligonucleotide
uggccagcauuacagcuaaagcuau

SEQ ID NO: 14227 - RNA, 25 nt, Artificial Sequence
  Synthetic Oligonucleotide
uggcuagcacuacagcuaaggccau

SEQ ID NO: 14228 - RNA, 25 nt, Artificial Sequence
  Synthetic Oligonucleotide
uggccagcacuacagcuuaugcuau

SEQ ID NO: 14229 - RNA, 25 nt, Artificial Sequence
  Synthetic Oligonucleotide
uagccagcacuacagcuaaagcuau

SEQ ID NO: 14230 - RNA, 25 nt, Artificial Sequence
  Synthetic Oligonucleotide
uggccaguacuacggcuaaggcuau

SEQ ID NO: 14231 - RNA, 25 nt, Artificial Sequence
  Synthetic Oligonucleotide
uggcuagcaccacagcuaaggcuau

SEQ ID NO: 14232 - RNA, 25 nt, Artificial Sequence
  Synthetic Oligonucleotide
uagccagcacuacggcuaaggcuau

SEQ ID NO: 14233 - RNA, 25 nt, Artificial Sequence
  Synthetic Oligonucleotide
uagcuagcacuacagcuaaggcuau

SEQ ID NO: 14234 - RNA, 25 nt, Artificial Sequence
  Synthetic Oligonucleotide
uagccagcacuacagccaaggcuau

SEQ ID NO: 14235 - RNA, 25 nt, Artificial Sequence
  Synthetic Oligonucleotide
uagccagcacuacggcuaaggccau

SEQ ID NO: 14236 - RNA, 25 nt, Artificial Sequence
  Synthetic Oligonucleotide
uagccagcacaacagcuaaggccau

SEQ ID NO: 14237 - RNA, 25 nt, Artificial Sequence
  Synthetic Oligonucleotide
uagccagcacaacagcuaaagccau

SEQ ID NO: 14238 - RNA, 25 nt, Artificial Sequence
  Synthetic Oligonucleotide
uagccagcaccacggcuaaggccau

SEQ ID NO: 14239 - RNA, 25 nt, Artificial Sequence
  Synthetic Oligonucleotide
uggccaguaccacggcuaaagccau

SEQ ID NO: 14240 - RNA, 25 nt, Artificial Sequence
  Synthetic Oligonucleotide
ggccagcacuacagcuaaggccaug

SEQ ID NO: 14241 - RNA, 25 nt, Artificial Sequence
  Synthetic Oligonucleotide
ggccagcacuacggcuaaggcuaug

SEQ ID NO: 14242 - RNA, 25 nt, Artificial Sequence
  Synthetic Oligonucleotide
ggccaguacuacagcuaaggcuaug

SEQ ID NO: 14243 - RNA, 25 nt, Artificial Sequence
  Synthetic Oligonucleotide
ggccagcacuacagcuaaagcuaug

SEQ ID NO: 14244 - RNA, 25 nt, Artificial Sequence
  Synthetic Oligonucleotide
ggccagcacuacagccaaggcuaug

SEQ ID NO: 14245 - RNA, 25 nt, Artificial Sequence
  Synthetic Oligonucleotide
ggccagcacuacagcgaaggcuaug

SEQ ID NO: 14246 - RNA, 25 nt, Artificial Sequence
  Synthetic Oligonucleotide
ggccagcacuaccgcuaaggcuaug

SEQ ID NO: 14247 - RNA, 25 nt, Artificial Sequence
  Synthetic Oligonucleotide
ggccagcacaacagcuaaggcuaug

SEQ ID NO: 14248 - RNA, 25 nt, Artificial Sequence
  Synthetic Oligonucleotide
ggccagcaccacagcuaaggcuaug

SEQ ID NO: 14249 - RNA, 25 nt, Artificial Sequence
  Synthetic Oligonucleotide
ggccagcaauacagcuaaggcuaug

SEQ ID NO: 14250 - RNA, 25 nt, Artificial Sequence
  Synthetic Oligonucleotide
ggcaagcacuacagcuaaggcuaug

SEQ ID NO: 14251 - RNA, 25 nt, Artificial Sequence
  Synthetic Oligonucleotide
agccagcacuacagcuaaggcuaug

SEQ ID NO: 14252 - RNA, 25 nt, Artificial Sequence
  Synthetic Oligonucleotide
ggccagcacuacggcuaaggccaug

SEQ ID NO: 14253 - RNA, 25 nt, Artificial Sequence
  Synthetic Oligonucleotide
ggcuagcacuacagcuaaggccaug

SEQ ID NO: 14254 - RNA, 25 nt, Artificial Sequence
  Synthetic Oligonucleotide
ggccagcacuacagcuaaagccaug

SEQ ID NO: 14255 - RNA, 25 nt, Artificial Sequence
  Synthetic Oligonucleotide
ggccagcacuacagcuaaagcgaug

SEQ ID NO: 14256 - RNA, 25 nt, Artificial Sequence
  Synthetic Oligonucleotide
ggccaguacuacggcuaaggcuaug

SEQ ID NO: 14257 - RNA, 25 nt, Artificial Sequence
  Synthetic Oligonucleotide
ggccagcauuacagcuaaagcuaug

SEQ ID NO: 14258 - RNA, 25 nt, Artificial Sequence
  Synthetic Oligonucleotide
ggcuagcaccacagcuaaggcuaug

SEQ ID NO: 14259 - RNA, 25 nt, Artificial Sequence
  Synthetic Oligonucleotide
agccagcacuacggcuaaggcuaug

SEQ ID NO: 14260 - RNA, 25 nt, Artificial Sequence
  Synthetic Oligonucleotide
agcuagcacuacagcuaaggcuaug

SEQ ID NO: 14261 - RNA, 25 nt, Artificial Sequence
  Synthetic Oligonucleotide
ggccagcacuacagcuuaugcuaug

SEQ ID NO: 14262 - RNA, 25 nt, Artificial Sequence
  Synthetic Oligonucleotide
agccagcacuacagcuaaagcuaug

SEQ ID NO: 14263 - RNA, 25 nt, Artificial Sequence
  Synthetic Oligonucleotide
agccagcacuacagccaaggcuaug

SEQ ID NO: 14264 - RNA, 25 nt, Artificial Sequence
  Synthetic Oligonucleotide
agccagcacuacggcuaaggccaug

SEQ ID NO: 14265 - RNA, 25 nt, Artificial Sequence
  Synthetic Oligonucleotide
agccagcacaacagcuaaggccaug

SEQ ID NO: 14266 - RNA, 25 nt, Artificial Sequence
  Synthetic Oligonucleotide
agccagcaccacggcuaaggccaug

SEQ ID NO: 14267 - RNA, 25 nt, Artificial Sequence
  Synthetic Oligonucleotide
agccagcacaacagcuaaagccaug

SEQ ID NO: 14268 - RNA, 25 nt, Artificial Sequence
  Synthetic Oligonucleotide
guuauucugcuggugcacuugcuag

SEQ ID NO: 14269 - RNA, 25 nt, Artificial Sequence
  Synthetic Oligonucleotide
guuauucugcuggugcacuagccag

SEQ ID NO: 14270 - RNA, 25 nt, Artificial Sequence
  Synthetic Oligonucleotide
guuauucugcuggugcacucgccag

SEQ ID NO: 14271 - RNA, 25 nt, Artificial Sequence
  Synthetic Oligonucleotide
guuauucugcuggugcgcuugccag

SEQ ID NO: 14272 - RNA, 25 nt, Artificial Sequence
  Synthetic Oligonucleotide
guuauucugcuggagcacuugccag

SEQ ID NO: 14273 - RNA, 25 nt, Artificial Sequence
  Synthetic Oligonucleotide
guuauucugcuggcgcacuugccag

SEQ ID NO: 14274 - RNA, 25 nt, Artificial Sequence
  Synthetic Oligonucleotide
guuauucugccggugcacuugccag

SEQ ID NO: 14275 - RNA, 25 nt, Artificial Sequence
  Synthetic Oligonucleotide
guuauuccgcuggugcacuugccag

SEQ ID NO: 14276 - RNA, 25 nt, Artificial Sequence
  Synthetic Oligonucleotide
guuauucggcuggugcacuugccag

SEQ ID NO: 14277 - RNA, 25 nt, Artificial Sequence
  Synthetic Oligonucleotide
guuacucugcuggugcacuugccag

SEQ ID NO: 14278 - RNA, 25 nt, Artificial Sequence
  Synthetic Oligonucleotide
gcuauucugcuggugcacuugccag

SEQ ID NO: 14279 - RNA, 25 nt, Artificial Sequence
  Synthetic Oligonucleotide
guuauucaacuggugcacuugccag

SEQ ID NO: 14280 - RNA, 25 nt, Artificial Sequence
  Synthetic Oligonucleotide
aguuauucugcuggugcacuugcua

SEQ ID NO: 14281 - RNA, 25 nt, Artificial Sequence
  Synthetic Oligonucleotide
aguuauucugcuggugcacuagcca

SEQ ID NO: 14282 - RNA, 25 nt, Artificial Sequence
  Synthetic Oligonucleotide
aguuauucugcuggugcacucgcca

SEQ ID NO: 14283 - RNA, 25 nt, Artificial Sequence
  Synthetic Oligonucleotide
aguuauucugcuggugcgcuugcca

SEQ ID NO: 14284 - RNA, 25 nt, Artificial Sequence
  Synthetic Oligonucleotide
gguuauucugcuggugcacuugcca

SEQ ID NO: 14285 - RNA, 25 nt, Artificial Sequence
  Synthetic Oligonucleotide
aguuauucugcuggagcacuugcca

SEQ ID NO: 14286 - RNA, 25 nt, Artificial Sequence
  Synthetic Oligonucleotide
aguuauucugcuggcgcacuugcca

SEQ ID NO: 14287 - RNA, 25 nt, Artificial Sequence
  Synthetic Oligonucleotide
aguuauucugccggugcacuugcca

SEQ ID NO: 14288 - RNA, 25 nt, Artificial Sequence
  Synthetic Oligonucleotide
aguuauuccgcuggugcacuugcca

SEQ ID NO: 14289 - RNA, 25 nt, Artificial Sequence
  Synthetic Oligonucleotide
aguuauucggcuggugcacuugcca

SEQ ID NO: 14290 - RNA, 25 nt, Artificial Sequence
  Synthetic Oligonucleotide
aguuacucugcuggugcacuugcca

SEQ ID NO: 14291 - RNA, 25 nt, Artificial Sequence
  Synthetic Oligonucleotide
agcuauucugcuggugcacuugcca

SEQ ID NO: 14292 - RNA, 25 nt, Artificial Sequence
  Synthetic Oligonucleotide
aguuauucaacuggugcacuugcca

SEQ ID NO: 14293 - RNA, 25 nt, Artificial Sequence
  Synthetic Oligonucleotide
uuauucugcuggugcacuugcuagu

SEQ ID NO: 14294 - RNA, 25 nt, Artificial Sequence
  Synthetic Oligonucleotide
uuauucugcuggugcacuugccagc

SEQ ID NO: 14295 - RNA, 25 nt, Artificial Sequence
  Synthetic Oligonucleotide
uuauucugcuggugcgcuugccagu

SEQ ID NO: 14296 - RNA, 25 nt, Artificial Sequence
  Synthetic Oligonucleotide
uuauucugcuggugcacuagccagu

SEQ ID NO: 14297 - RNA, 25 nt, Artificial Sequence
  Synthetic Oligonucleotide
uuauucugcuggugcacucgccagu

SEQ ID NO: 14298 - RNA, 25 nt, Artificial Sequence
  Synthetic Oligonucleotide
uuauucugcuggagcacuugccagu

SEQ ID NO: 14299 - RNA, 25 nt, Artificial Sequence
  Synthetic Oligonucleotide
uuauucugcuggcgcacuugccagu

SEQ ID NO: 14300 - RNA, 25 nt, Artificial Sequence
  Synthetic Oligonucleotide
uuauucugccggugcacuugccagu

SEQ ID NO: 14301 - RNA, 25 nt, Artificial Sequence
  Synthetic Oligonucleotide
uuauuccgcuggugcacuugccagu

SEQ ID NO: 14302 - RNA, 25 nt, Artificial Sequence
  Synthetic Oligonucleotide
uuauucggcuggugcacuugccagu

SEQ ID NO: 14303 - RNA, 25 nt, Artificial Sequence
  Synthetic Oligonucleotide
uuacucugcuggugcacuugccagu

SEQ ID NO: 14304 - RNA, 25 nt, Artificial Sequence
  Synthetic Oligonucleotide
cuauucugcuggugcacuugccagu

SEQ ID NO: 14305 - RNA, 25 nt, Artificial Sequence
  Synthetic Oligonucleotide
uuauucugcuggugcgcuugccagc

SEQ ID NO: 14306 - RNA, 25 nt, Artificial Sequence
  Synthetic Oligonucleotide
uuauucaacuggugcacuugccagu

SEQ ID NO: 14307 - RNA, 25 nt, Artificial Sequence
  Synthetic Oligonucleotide
caguuauucugcuggugcacuugcu

SEQ ID NO: 14308 - RNA, 25 nt, Artificial Sequence
  Synthetic Oligonucleotide
caguuauucugcuggugcacuagcc

SEQ ID NO: 14309 - RNA, 25 nt, Artificial Sequence
  Synthetic Oligonucleotide
caguuauucugcuggugcacucgcc

SEQ ID NO: 14310 - RNA, 25 nt, Artificial Sequence
  Synthetic Oligonucleotide
caguuauucugcuggugcgcuugcc

SEQ ID NO: 14311 - RNA, 25 nt, Artificial Sequence
  Synthetic Oligonucleotide
cgguuauucugcuggugcacuugcc

SEQ ID NO: 14312 - RNA, 25 nt, Artificial Sequence
  Synthetic Oligonucleotide
uaguuauucugcuggugcacuugcc

SEQ ID NO: 14313 - RNA, 25 nt, Artificial Sequence
  Synthetic Oligonucleotide
caguuauucugcuggagcacuugcc

SEQ ID NO: 14314 - RNA, 25 nt, Artificial Sequence
  Synthetic Oligonucleotide
caguuauucugcuggcgcacuugcc

SEQ ID NO: 14315 - RNA, 25 nt, Artificial Sequence
  Synthetic Oligonucleotide
caguuauucugccggugcacuugcc

SEQ ID NO: 14316 - RNA, 25 nt, Artificial Sequence
  Synthetic Oligonucleotide
caguuauuccgcuggugcacuugcc

SEQ ID NO: 14317 - RNA, 25 nt, Artificial Sequence
  Synthetic Oligonucleotide
caguuauucggcuggugcacuugcc

SEQ ID NO: 14318 - RNA, 25 nt, Artificial Sequence
  Synthetic Oligonucleotide
caguuacucugcuggugcacuugcc

SEQ ID NO: 14319 - RNA, 25 nt, Artificial Sequence
  Synthetic Oligonucleotide
cagcuauucugcuggugcacuugcc

SEQ ID NO: 14320 - RNA, 25 nt, Artificial Sequence
  Synthetic Oligonucleotide
caguuauucaacuggugcacuugcc

SEQ ID NO: 14321 - RNA, 25 nt, Artificial Sequence
  Synthetic Oligonucleotide
ucauggaauggcuaaagacaagauc

SEQ ID NO: 14322 - RNA, 25 nt, Artificial Sequence
  Synthetic Oligonucleotide
ucauggaauggcuaaagacaaggcc

SEQ ID NO: 14323 - RNA, 25 nt, Artificial Sequence
  Synthetic Oligonucleotide
ucauggaauggcuaaagacaaaacc

SEQ ID NO: 14324 - RNA, 25 nt, Artificial Sequence
  Synthetic Oligonucleotide
ucauggaauggcuaaagacuagacc

SEQ ID NO: 14325 - RNA, 25 nt, Artificial Sequence
  Synthetic Oligonucleotide
ucauggaauggcugaagacaagacc

SEQ ID NO: 14326 - RNA, 25 nt, Artificial Sequence
  Synthetic Oligonucleotide
ucauggaaugguuaaagacaagacc

SEQ ID NO: 14327 - RNA, 25 nt, Artificial Sequence
  Synthetic Oligonucleotide
ucauggaguggcuaaagacaagacc

SEQ ID NO: 14328 - RNA, 25 nt, Artificial Sequence
  Synthetic Oligonucleotide
ucauggaauggcuaaagccaagacc

SEQ ID NO: 14329 - RNA, 25 nt, Artificial Sequence
  Synthetic Oligonucleotide
ucacggaauggcuaaagacaagacc

SEQ ID NO: 14330 - RNA, 25 nt, Artificial Sequence
  Synthetic Oligonucleotide
uaauggaauggcuaaagacaagacc

SEQ ID NO: 14331 - RNA, 25 nt, Artificial Sequence
  Synthetic Oligonucleotide
ucauggaguggcugaagacaagacc

SEQ ID NO: 14332 - RNA, 25 nt, Artificial Sequence
  Synthetic Oligonucleotide
cucauggaauggcuaaagacaagau

SEQ ID NO: 14333 - RNA, 25 nt, Artificial Sequence
  Synthetic Oligonucleotide
cucauggaauggcuaaagacaaggc

SEQ ID NO: 14334 - RNA, 25 nt, Artificial Sequence
  Synthetic Oligonucleotide
cucauggaauggcuaaagacaaaac

SEQ ID NO: 14335 - RNA, 25 nt, Artificial Sequence
  Synthetic Oligonucleotide
cucauggaauggcuaaagacuagac

SEQ ID NO: 14336 - RNA, 25 nt, Artificial Sequence
  Synthetic Oligonucleotide
cucauggaauggcugaagacaagac

SEQ ID NO: 14337 - RNA, 25 nt, Artificial Sequence
  Synthetic Oligonucleotide
cucauggaaugguuaaagacaagac

SEQ ID NO: 14338 - RNA, 25 nt, Artificial Sequence
  Synthetic Oligonucleotide
cucauggaguggcuaaagacaagac

SEQ ID NO: 14339 - RNA, 25 nt, Artificial Sequence
  Synthetic Oligonucleotide
cucauggaauggcuaaagccaagac

SEQ ID NO: 14340 - RNA, 25 nt, Artificial Sequence
  Synthetic Oligonucleotide
cucacggaauggcuaaagacaagac

SEQ ID NO: 14341 - RNA, 25 nt, Artificial Sequence
  Synthetic Oligonucleotide
cuaauggaauggcuaaagacaagac

SEQ ID NO: 14342 - RNA, 25 nt, Artificial Sequence
  Synthetic Oligonucleotide
cucauggaguggcugaagacaagac

SEQ ID NO: 14343 - RNA, 25 nt, Artificial Sequence
  Synthetic Oligonucleotide
ucucauggaauggcuaaagacaagg

SEQ ID NO: 14344 - RNA, 25 nt, Artificial Sequence
  Synthetic Oligonucleotide
ucucauggaauggcuaaagacaaaa

SEQ ID NO: 14345 - RNA, 25 nt, Artificial Sequence
  Synthetic Oligonucleotide
ucucauggaauggcuaaagacuaga

SEQ ID NO: 14346 - RNA, 25 nt, Artificial Sequence
  Synthetic Oligonucleotide
ucucauggaauggcuaaagccaaga

SEQ ID NO: 14347 - RNA, 25 nt, Artificial Sequence
  Synthetic Oligonucleotide
ucucauggaauggcugaagacaaga

SEQ ID NO: 14348 - RNA, 25 nt, Artificial Sequence
  Synthetic Oligonucleotide
ucucauggaaugguuaaagacaaga

SEQ ID NO: 14349 - RNA, 25 nt, Artificial Sequence
  Synthetic Oligonucleotide
ucucauggaguggcuaaagacaaga

SEQ ID NO: 14350 - RNA, 25 nt, Artificial Sequence
  Synthetic Oligonucleotide
ucucacggaauggcuaaagacaaga

SEQ ID NO: 14351 - RNA, 25 nt, Artificial Sequence
  Synthetic Oligonucleotide
ucuaauggaauggcuaaagacaaga

SEQ ID NO: 14352 - RNA, 25 nt, Artificial Sequence
  Synthetic Oligonucleotide
acucauggaauggcuaaagacaaga

SEQ ID NO: 14353 - RNA, 25 nt, Artificial Sequence
  Synthetic Oligonucleotide
ucucauggaguggcugaagacaaga

SEQ ID NO: 14354 - RNA, 25 nt, Artificial Sequence
  Synthetic Oligonucleotide
gcucucauggaauggcuaaagacua

SEQ ID NO: 14355 - RNA, 25 nt, Artificial Sequence
  Synthetic Oligonucleotide
gcucucauggaauggcuaaagccaa

SEQ ID NO: 14356 - RNA, 25 nt, Artificial Sequence
  Synthetic Oligonucleotide
gcucucauggaauggcugaagacaa

SEQ ID NO: 14357 - RNA, 25 nt, Artificial Sequence
  Synthetic Oligonucleotide
gcucucauggaaugguuaaagacaa

SEQ ID NO: 14358 - RNA, 25 nt, Artificial Sequence
  Synthetic Oligonucleotide
gcucucauggaguggcuaaagacaa

SEQ ID NO: 14359 - RNA, 25 nt, Artificial Sequence
  Synthetic Oligonucleotide
guucucauggaauggcuaaagacaa

SEQ ID NO: 14360 - RNA, 25 nt, Artificial Sequence
  Synthetic Oligonucleotide
gcucucacggaauggcuaaagacaa

SEQ ID NO: 14361 - RNA, 25 nt, Artificial Sequence
  Synthetic Oligonucleotide
gcucuaauggaauggcuaaagacaa

SEQ ID NO: 14362 - RNA, 25 nt, Artificial Sequence
  Synthetic Oligonucleotide
gcacucauggaauggcuaaagacaa

SEQ ID NO: 14363 - RNA, 25 nt, Artificial Sequence
  Synthetic Oligonucleotide
guucucauggaauggcuaaagacua

SEQ ID NO: 14364 - RNA, 25 nt, Artificial Sequence
  Synthetic Oligonucleotide
gcucucauggaguggcugaagacaa

SEQ ID NO: 14365 - RNA, 25 nt, Artificial Sequence
  Synthetic Oligonucleotide
guucucacggaauggcuaaagacaa

SEQ ID NO: 14366 - RNA, 25 nt, Artificial Sequence
  Synthetic Oligonucleotide
ugucaccucugacuaaggggauucu

SEQ ID NO: 14367 - RNA, 25 nt, Artificial Sequence
  Synthetic Oligonucleotide
ugucaccucugacuaaggggaucuu

SEQ ID NO: 14368 - RNA, 25 nt, Artificial Sequence
  Synthetic Oligonucleotide
ugucaccucugacuaagggaauuuu

SEQ ID NO: 14369 - RNA, 25 nt, Artificial Sequence
  Synthetic Oligonucleotide
ugucaccucugacuaaggguauuuu

SEQ ID NO: 14370 - RNA, 25 nt, Artificial Sequence
  Synthetic Oligonucleotide
ugucaccucugacuaaggggauccu

SEQ ID NO: 14371 - RNA, 25 nt, Artificial Sequence
  Synthetic Oligonucleotide
ugucaccucugacuaaggggauwcu

SEQ ID NO: 14372 - RNA, 25 nt, Artificial Sequence
  Synthetic Oligonucleotide
ugucaccucugacuagggggauuuu

SEQ ID NO: 14373 - RNA, 25 nt, Artificial Sequence
  Synthetic Oligonucleotide
ugucacuucugacuaaggggauuuu

SEQ ID NO: 14374 - RNA, 25 nt, Artificial Sequence
  Synthetic Oligonucleotide
ugucgccucugacuaaggggauuuu

SEQ ID NO: 14375 - RNA, 25 nt, Artificial Sequence
  Synthetic Oligonucleotide
ugucaccucugacuaaagggauuuu

SEQ ID NO: 14376 - RNA, 25 nt, Artificial Sequence
  Synthetic Oligonucleotide
ugucaccucugacaaaggggauuuu

SEQ ID NO: 14377 - RNA, 25 nt, Artificial Sequence
  Synthetic Oligonucleotide
ugucaccucugaccaaggggauuuu

SEQ ID NO: 14378 - RNA, 25 nt, Artificial Sequence
  Synthetic Oligonucleotide
ugucaccucuaacuaaggggauuuu

SEQ ID NO: 14379 - RNA, 25 nt, Artificial Sequence
  Synthetic Oligonucleotide
ugucaccucuuacuaaggggauuuu

SEQ ID NO: 14380 - RNA, 25 nt, Artificial Sequence
  Synthetic Oligonucleotide
ugucuccucugacuaaggggauuuu

SEQ ID NO: 14381 - RNA, 25 nt, Artificial Sequence
  Synthetic Oligonucleotide
ugucaccucugacuaaagggaucuu

SEQ ID NO: 14382 - RNA, 25 nt, Artificial Sequence
  Synthetic Oligonucleotide
ugucaccucugacuaaagggauguu

SEQ ID NO: 14383 - RNA, 25 nt, Artificial Sequence
  Synthetic Oligonucleotide
ugucaccucugaccaagggaauuuu

SEQ ID NO: 14384 - RNA, 25 nt, Artificial Sequence
  Synthetic Oligonucleotide
ugucaccacugacuaagggaauuuu

SEQ ID NO: 14385 - RNA, 25 nt, Artificial Sequence
  Synthetic Oligonucleotide
ugucaccucuaacuaaggggauccu

SEQ ID NO: 14386 - RNA, 25 nt, Artificial Sequence
  Synthetic Oligonucleotide
ugucaccucugacaaaagggauuuu

SEQ ID NO: 14387 - RNA, 25 nt, Artificial Sequence
  Synthetic Oligonucleotide
ugucaccuuugacuaaagggauguu

SEQ ID NO: 14388 - RNA, 25 nt, Artificial Sequence
  Synthetic Oligonucleotide
cugucaccucugacuaaggggauuc

SEQ ID NO: 14389 - RNA, 25 nt, Artificial Sequence
  Synthetic Oligonucleotide
cugucaccucugacuaaggggaucu

SEQ ID NO: 14390 - RNA, 25 nt, Artificial Sequence
  Synthetic Oligonucleotide
cugucaccucugacuaagggaauuu

SEQ ID NO: 14391 - RNA, 25 nt, Artificial Sequence
  Synthetic Oligonucleotide
cugucaccucugacuaaggguauuu

SEQ ID NO: 14392 - RNA, 25 nt, Artificial Sequence
  Synthetic Oligonucleotide
cugucaccucugacuaaggggaucc

SEQ ID NO: 14393 - RNA, 25 nt, Artificial Sequence
  Synthetic Oligonucleotide
cugucaccucugacuaaggggauwc

SEQ ID NO: 14394 - RNA, 25 nt, Artificial Sequence
  Synthetic Oligonucleotide
cugucaccucugacuagggggauuu

SEQ ID NO: 14395 - RNA, 25 nt, Artificial Sequence
  Synthetic Oligonucleotide
cugucacuucugacuaaggggauuu

SEQ ID NO: 14396 - RNA, 25 nt, Artificial Sequence
  Synthetic Oligonucleotide
cugucgccucugacuaaggggauuu

SEQ ID NO: 14397 - RNA, 25 nt, Artificial Sequence
  Synthetic Oligonucleotide
cugucaccucugacuaaagggauuu

SEQ ID NO: 14398 - RNA, 25 nt, Artificial Sequence
  Synthetic Oligonucleotide
cugucaccucugacaaaggggauuu

SEQ ID NO: 14399 - RNA, 25 nt, Artificial Sequence
  Synthetic Oligonucleotide
cugucaccucugaccaaggggauuu

SEQ ID NO: 14400 - RNA, 25 nt, Artificial Sequence
  Synthetic Oligonucleotide
cugucaccucuaacuaaggggauuu

SEQ ID NO: 14401 - RNA, 25 nt, Artificial Sequence
  Synthetic Oligonucleotide
cugucaccucuuacuaaggggauuu

SEQ ID NO: 14402 - RNA, 25 nt, Artificial Sequence
  Synthetic Oligonucleotide
cugucuccucugacuaaggggauuu

SEQ ID NO: 14403 - RNA, 25 nt, Artificial Sequence
  Synthetic Oligonucleotide
cugucaccucugacuaaagggaucu

SEQ ID NO: 14404 - RNA, 25 nt, Artificial Sequence
  Synthetic Oligonucleotide
cugucaccucugacuaaagggaugu

SEQ ID NO: 14405 - RNA, 25 nt, Artificial Sequence
  Synthetic Oligonucleotide
cugucaccucugaccaagggaauuu

SEQ ID NO: 14406 - RNA, 25 nt, Artificial Sequence
  Synthetic Oligonucleotide
cugucaccacugacuaagggaauuu

SEQ ID NO: 14407 - RNA, 25 nt, Artificial Sequence
  Synthetic Oligonucleotide
cugucaccucuaacuaaggggaucc

SEQ ID NO: 14408 - RNA, 25 nt, Artificial Sequence
  Synthetic Oligonucleotide
uugucaccucugacuaaagggauuu

SEQ ID NO: 14409 - RNA, 25 nt, Artificial Sequence
  Synthetic Oligonucleotide
cugucaccucugacaaaagggauuu

SEQ ID NO: 14410 - RNA, 25 nt, Artificial Sequence
  Synthetic Oligonucleotide
cugucaccuuugacuaaagggaugu

SEQ ID NO: 14411 - RNA, 25 nt, Artificial Sequence
  Synthetic Oligonucleotide
aggcucucauggaauggcugaagac

SEQ ID NO: 14412 - RNA, 25 nt, Artificial Sequence
  Synthetic Oligonucleotide
aggcucucauggaauggcuaaagcc

SEQ ID NO: 14413 - RNA, 25 nt, Artificial Sequence
  Synthetic Oligonucleotide
aggcucucauggaaugguuaaagac

SEQ ID NO: 14414 - RNA, 25 nt, Artificial Sequence
  Synthetic Oligonucleotide
aggcucucauggaguggcuaaagac

SEQ ID NO: 14415 - RNA, 25 nt, Artificial Sequence
  Synthetic Oligonucleotide
agguucucauggaauggcuaaagac

SEQ ID NO: 14416 - RNA, 25 nt, Artificial Sequence
  Synthetic Oligonucleotide
aggcucucauggaguggcugaagac

SEQ ID NO: 14417 - RNA, 25 nt, Artificial Sequence
  Synthetic Oligonucleotide
aggcucucacggaauggcuaaagac

SEQ ID NO: 14418 - RNA, 25 nt, Artificial Sequence
  Synthetic Oligonucleotide
aggcucuaauggaauggcuaaagac

SEQ ID NO: 14419 - RNA, 25 nt, Artificial Sequence
  Synthetic Oligonucleotide
aggcacucauggaauggcuaaagac

SEQ ID NO: 14420 - RNA, 25 nt, Artificial Sequence
  Synthetic Oligonucleotide
aagcucucauggaauggcuaaagac

SEQ ID NO: 14421 - RNA, 25 nt, Artificial Sequence
  Synthetic Oligonucleotide
augcucucauggaauggcuaaagac

SEQ ID NO: 14422 - RNA, 25 nt, Artificial Sequence
  Synthetic Oligonucleotide
agguucucacggaauggcuaaagac

SEQ ID NO: 14423 - RNA, 25 nt, Artificial Sequence
  Synthetic Oligonucleotide
gaggcucucauggaauggcugaaga

SEQ ID NO: 14424 - RNA, 25 nt, Artificial Sequence
  Synthetic Oligonucleotide
gaggcucucauggaauggcuaaagc

SEQ ID NO: 14425 - RNA, 25 nt, Artificial Sequence
  Synthetic Oligonucleotide
gaggcucucauggaaugguuaaaga

SEQ ID NO: 14426 - RNA, 25 nt, Artificial Sequence
  Synthetic Oligonucleotide
gaggcucucauggaguggcuaaaga

SEQ ID NO: 14427 - RNA, 25 nt, Artificial Sequence
  Synthetic Oligonucleotide
gagguucucauggaauggcuaaaga

SEQ ID NO: 14428 - RNA, 25 nt, Artificial Sequence
  Synthetic Oligonucleotide
gaggcucucauggaguggcugaaga

SEQ ID NO: 14429 - RNA, 25 nt, Artificial Sequence
  Synthetic Oligonucleotide
gaggcucucacggaauggcuaaaga

SEQ ID NO: 14430 - RNA, 25 nt, Artificial Sequence
  Synthetic Oligonucleotide
gaggcucuaauggaauggcuaaaga

SEQ ID NO: 14431 - RNA, 25 nt, Artificial Sequence
  Synthetic Oligonucleotide
gaggcacucauggaauggcuaaaga

SEQ ID NO: 14432 - RNA, 25 nt, Artificial Sequence
  Synthetic Oligonucleotide
gaagcucucauggaauggcuaaaga

SEQ ID NO: 14433 - RNA, 25 nt, Artificial Sequence
  Synthetic Oligonucleotide
gaugcucucauggaauggcuaaaga

SEQ ID NO: 14434 - RNA, 25 nt, Artificial Sequence
  Synthetic Oligonucleotide
gagguucucacggaauggcuaaaga

SEQ ID NO: 14435 - RNA, 25 nt, Artificial Sequence
  Synthetic Oligonucleotide
ggcucucauggaauggcuaaagacu

SEQ ID NO: 14436 - RNA, 25 nt, Artificial Sequence
  Synthetic Oligonucleotide
ggcucucauggaauggcuaaagcca

SEQ ID NO: 14437 - RNA, 25 nt, Artificial Sequence
  Synthetic Oligonucleotide
ggcucucauggaauggcugaagaca

SEQ ID NO: 14438 - RNA, 25 nt, Artificial Sequence
  Synthetic Oligonucleotide
ggcucucauggaaugguuaaagaca

SEQ ID NO: 14439 - RNA, 25 nt, Artificial Sequence
  Synthetic Oligonucleotide
ggcucucauggaguggcuaaagaca

SEQ ID NO: 14440 - RNA, 25 nt, Artificial Sequence
  Synthetic Oligonucleotide
gguucucauggaauggcuaaagaca

SEQ ID NO: 14441 - RNA, 25 nt, Artificial Sequence
  Synthetic Oligonucleotide
ggcucucacggaauggcuaaagaca

SEQ ID NO: 14442 - RNA, 25 nt, Artificial Sequence
  Synthetic Oligonucleotide
ggcucuaauggaauggcuaaagaca

SEQ ID NO: 14443 - RNA, 25 nt, Artificial Sequence
  Synthetic Oligonucleotide
ggcacucauggaauggcuaaagaca

SEQ ID NO: 14444 - RNA, 25 nt, Artificial Sequence
  Synthetic Oligonucleotide
agcucucauggaauggcuaaagaca

SEQ ID NO: 14445 - RNA, 25 nt, Artificial Sequence
  Synthetic Oligonucleotide
ugcucucauggaauggcuaaagaca

SEQ ID NO: 14446 - RNA, 25 nt, Artificial Sequence
  Synthetic Oligonucleotide
gguucucauggaauggcuaaagacu

SEQ ID NO: 14447 - RNA, 25 nt, Artificial Sequence
  Synthetic Oligonucleotide
ggcucucauggaguggcugaagaca

SEQ ID NO: 14448 - RNA, 25 nt, Artificial Sequence
  Synthetic Oligonucleotide
gguucucacggaauggcuaaagaca

SEQ ID NO: 14449 - RNA, 25 nt, Artificial Sequence
  Synthetic Oligonucleotide
cucucauggaauggcuaaagacaaa

SEQ ID NO: 14450 - RNA, 25 nt, Artificial Sequence
  Synthetic Oligonucleotide
cucucauggaauggcuaaagacuag

SEQ ID NO: 14451 - RNA, 25 nt, Artificial Sequence
  Synthetic Oligonucleotide
cucucauggaauggcuaaagccaag

SEQ ID NO: 14452 - RNA, 25 nt, Artificial Sequence
  Synthetic Oligonucleotide
cucucauggaauggcugaagacaag

SEQ ID NO: 14453 - RNA, 25 nt, Artificial Sequence
  Synthetic Oligonucleotide
cucucauggaaugguuaaagacaag

SEQ ID NO: 14454 - RNA, 25 nt, Artificial Sequence
  Synthetic Oligonucleotide
cucucauggaguggcuaaagacaag

SEQ ID NO: 14455 - RNA, 25 nt, Artificial Sequence
  Synthetic Oligonucleotide
uucucauggaauggcuaaagacaag

SEQ ID NO: 14456 - RNA, 25 nt, Artificial Sequence
  Synthetic Oligonucleotide
cucucacggaauggcuaaagacaag

SEQ ID NO: 14457 - RNA, 25 nt, Artificial Sequence
  Synthetic Oligonucleotide
cucuaauggaauggcuaaagacaag

SEQ ID NO: 14458 - RNA, 25 nt, Artificial Sequence
  Synthetic Oligonucleotide
cacucauggaauggcuaaagacaag

SEQ ID NO: 14459 - RNA, 25 nt, Artificial Sequence
  Synthetic Oligonucleotide
uucucauggaauggcuaaagacuag

SEQ ID NO: 14460 - RNA, 25 nt, Artificial Sequence
  Synthetic Oligonucleotide
cucucauggaguggcugaagacaag

SEQ ID NO: 14461 - RNA, 25 nt, Artificial Sequence
  Synthetic Oligonucleotide
uucucacggaauggcuaaagacaag

SEQ ID NO: 14462 - RNA, 25 nt, Artificial Sequence
  Synthetic Oligonucleotide
cuugaggcucucauggaauggcuga

SEQ ID NO: 14463 - RNA, 25 nt, Artificial Sequence
  Synthetic Oligonucleotide
cuugaggcucucauggaaugguuaa

SEQ ID NO: 14464 - RNA, 25 nt, Artificial Sequence
  Synthetic Oligonucleotide
cuugaggcucucauggaguggcuaa

SEQ ID NO: 14465 - RNA, 25 nt, Artificial Sequence
  Synthetic Oligonucleotide
cuugagguucucauggaauggcuaa

SEQ ID NO: 14466 - RNA, 25 nt, Artificial Sequence
  Synthetic Oligonucleotide
cuugaggcucucacggaauggcuaa

SEQ ID NO: 14467 - RNA, 25 nt, Artificial Sequence
  Synthetic Oligonucleotide
cuugaggcucuaauggaauggcuaa

SEQ ID NO: 14468 - RNA, 25 nt, Artificial Sequence
  Synthetic Oligonucleotide
cuugaggcacucauggaauggcuaa

SEQ ID NO: 14469 - RNA, 25 nt, Artificial Sequence
  Synthetic Oligonucleotide
cuugaagcucucauggaauggcuaa

SEQ ID NO: 14470 - RNA, 25 nt, Artificial Sequence
  Synthetic Oligonucleotide
cuugaugcucucauggaauggcuaa

SEQ ID NO: 14471 - RNA, 25 nt, Artificial Sequence
  Synthetic Oligonucleotide
cuagaggcucucauggaauggcuaa

SEQ ID NO: 14472 - RNA, 25 nt, Artificial Sequence
  Synthetic Oligonucleotide
cucgaggcucucauggaauggcuaa

SEQ ID NO: 14473 - RNA, 25 nt, Artificial Sequence
  Synthetic Oligonucleotide
cucgaggcucucauggaauggcuga

SEQ ID NO: 14474 - RNA, 25 nt, Artificial Sequence
  Synthetic Oligonucleotide
cuugagguucucacggaauggcuaa

SEQ ID NO: 14475 - RNA, 25 nt, Artificial Sequence
  Synthetic Oligonucleotide
cucgaggcucucauggaguggcuaa

SEQ ID NO: 14476 - RNA, 25 nt, Artificial Sequence
  Synthetic Oligonucleotide
cuagaggcucucauggaguggcuga

SEQ ID NO: 14477 - RNA, 25 nt, Artificial Sequence
  Synthetic Oligonucleotide
cucgaggcucucauggaguggcuga

SEQ ID NO: 14478 - RNA, 25 nt, Artificial Sequence
  Synthetic Oligonucleotide
cucgaggcacucauggaauggcuaa

SEQ ID NO: 14479 - RNA, 25 nt, Artificial Sequence
  Synthetic Oligonucleotide
uugaggcucucauggaauggcugaa

SEQ ID NO: 14480 - RNA, 25 nt, Artificial Sequence
  Synthetic Oligonucleotide
uugaggcucucauggaaugguuaaa

SEQ ID NO: 14481 - RNA, 25 nt, Artificial Sequence
  Synthetic Oligonucleotide
uugaggcucucauggaguggcuaaa

SEQ ID NO: 14482 - RNA, 25 nt, Artificial Sequence
  Synthetic Oligonucleotide
uugagguucucauggaauggcuaaa

SEQ ID NO: 14483 - RNA, 25 nt, Artificial Sequence
  Synthetic Oligonucleotide
uugaggcucucacggaauggcuaaa

SEQ ID NO: 14484 - RNA, 25 nt, Artificial Sequence
  Synthetic Oligonucleotide
uugaggcucuaauggaauggcuaaa

SEQ ID NO: 14485 - RNA, 25 nt, Artificial Sequence
  Synthetic Oligonucleotide
uugaggcacucauggaauggcuaaa

SEQ ID NO: 14486 - RNA, 25 nt, Artificial Sequence
  Synthetic Oligonucleotide
uugaagcucucauggaauggcuaaa

SEQ ID NO: 14487 - RNA, 25 nt, Artificial Sequence
  Synthetic Oligonucleotide
uugaugcucucauggaauggcuaaa

SEQ ID NO: 14488 - RNA, 25 nt, Artificial Sequence
  Synthetic Oligonucleotide
uagaggcucucauggaauggcuaaa

SEQ ID NO: 14489 - RNA, 25 nt, Artificial Sequence
  Synthetic Oligonucleotide
ucgaggcucucauggaauggcuaaa

SEQ ID NO: 14490 - RNA, 25 nt, Artificial Sequence
  Synthetic Oligonucleotide
ucgaggcucucauggaauggcugaa

SEQ ID NO: 14491 - RNA, 25 nt, Artificial Sequence
  Synthetic Oligonucleotide
uugagguucucacggaauggcuaaa

SEQ ID NO: 14492 - RNA, 25 nt, Artificial Sequence
  Synthetic Oligonucleotide
ucgaggcucucauggaguggcuaaa

SEQ ID NO: 14493 - RNA, 25 nt, Artificial Sequence
  Synthetic Oligonucleotide
uagaggcucucauggaguggcugaa

SEQ ID NO: 14494 - RNA, 25 nt, Artificial Sequence
  Synthetic Oligonucleotide
ucgaggcucucauggaguggcugaa

SEQ ID NO: 14495 - RNA, 25 nt, Artificial Sequence
  Synthetic Oligonucleotide
ucgaggcacucauggaauggcuaaa

SEQ ID NO: 14496 - RNA, 25 nt, Artificial Sequence
  Synthetic Oligonucleotide
ugaggcucucauggaauggcugaag

SEQ ID NO: 14497 - RNA, 25 nt, Artificial Sequence
  Synthetic Oligonucleotide
ugaggcucucauggaaugguuaaag

SEQ ID NO: 14498 - RNA, 25 nt, Artificial Sequence
  Synthetic Oligonucleotide
ugaggcucucauggaguggcuaaag

SEQ ID NO: 14499 - RNA, 25 nt, Artificial Sequence
  Synthetic Oligonucleotide
ugagguucucauggaauggcuaaag

SEQ ID NO: 14500 - RNA, 25 nt, Artificial Sequence
  Synthetic Oligonucleotide
ugaggcucucacggaauggcuaaag

SEQ ID NO: 14501 - RNA, 25 nt, Artificial Sequence
  Synthetic Oligonucleotide
ugaggcucuaauggaauggcuaaag

SEQ ID NO: 14502 - RNA, 25 nt, Artificial Sequence
  Synthetic Oligonucleotide
ugaggcacucauggaauggcuaaag

SEQ ID NO: 14503 - RNA, 25 nt, Artificial Sequence
  Synthetic Oligonucleotide
ugaagcucucauggaauggcuaaag

SEQ ID NO: 14504 - RNA, 25 nt, Artificial Sequence
  Synthetic Oligonucleotide
ugaugcucucauggaauggcuaaag

SEQ ID NO: 14505 - RNA, 25 nt, Artificial Sequence
  Synthetic Oligonucleotide
agaggcucucauggaauggcuaaag

SEQ ID NO: 14506 - RNA, 25 nt, Artificial Sequence
  Synthetic Oligonucleotide
cgaggcucucauggaauggcuaaag

SEQ ID NO: 14507 - RNA, 25 nt, Artificial Sequence
  Synthetic Oligonucleotide
cgaggcucucauggaauggcugaag

SEQ ID NO: 14508 - RNA, 25 nt, Artificial Sequence
  Synthetic Oligonucleotide
ugagguucucacggaauggcuaaag

SEQ ID NO: 14509 - RNA, 25 nt, Artificial Sequence
  Synthetic Oligonucleotide
cgaggcucucauggaguggcuaaag

SEQ ID NO: 14510 - RNA, 25 nt, Artificial Sequence
  Synthetic Oligonucleotide
agaggcucucauggaguggcugaag

SEQ ID NO: 14511 - RNA, 25 nt, Artificial Sequence
  Synthetic Oligonucleotide
cgaggcucucauggaguggcugaag

SEQ ID NO: 14512 - RNA, 25 nt, Artificial Sequence
  Synthetic Oligonucleotide
cgaggcacucauggaauggcuaaag

SEQ ID NO: 14513 - RNA, 25 nt, Artificial Sequence
  Synthetic Oligonucleotide
gaucuugaggcucucauggaauggu

SEQ ID NO: 14514 - RNA, 25 nt, Artificial Sequence
  Synthetic Oligonucleotide
gaucuugaggcucucauggaguggc

SEQ ID NO: 14515 - RNA, 25 nt, Artificial Sequence
  Synthetic Oligonucleotide
gaucuugagguucucauggaauggc

SEQ ID NO: 14516 - RNA, 25 nt, Artificial Sequence
  Synthetic Oligonucleotide
gaucuugaggcucucacggaauggc

SEQ ID NO: 14517 - RNA, 25 nt, Artificial Sequence
  Synthetic Oligonucleotide
gaucuugaggcucuaauggaauggc

SEQ ID NO: 14518 - RNA, 25 nt, Artificial Sequence
  Synthetic Oligonucleotide
gaucuugaggcacucauggaauggc

SEQ ID NO: 14519 - RNA, 25 nt, Artificial Sequence
  Synthetic Oligonucleotide
gaucuugaagcucucauggaauggc

SEQ ID NO: 14520 - RNA, 25 nt, Artificial Sequence
  Synthetic Oligonucleotide
gaucuugaugcucucauggaauggc

SEQ ID NO: 14521 - RNA, 25 nt, Artificial Sequence
  Synthetic Oligonucleotide
gaucuagaggcucucauggaauggc

SEQ ID NO: 14522 - RNA, 25 nt, Artificial Sequence
  Synthetic Oligonucleotide
gaucucgaggcucucauggaauggc

SEQ ID NO: 14523 - RNA, 25 nt, Artificial Sequence
  Synthetic Oligonucleotide
gaccuugaggcucucauggaauggc

SEQ ID NO: 14524 - RNA, 25 nt, Artificial Sequence
  Synthetic Oligonucleotide
gaucuagaggcucucauggaguggc

SEQ ID NO: 14525 - RNA, 25 nt, Artificial Sequence
  Synthetic Oligonucleotide
gaucucgaggcucucauggaguggc

SEQ ID NO: 14526 - RNA, 25 nt, Artificial Sequence
  Synthetic Oligonucleotide
gaccuugaggcucucauggaguggc

SEQ ID NO: 14527 - RNA, 25 nt, Artificial Sequence
  Synthetic Oligonucleotide
gaucuugagguucucacggaauggc

SEQ ID NO: 14528 - RNA, 25 nt, Artificial Sequence
  Synthetic Oligonucleotide
gaucucgaggcacucauggaauggc

SEQ ID NO: 14529 - RNA, 25 nt, Artificial Sequence
  Synthetic Oligonucleotide
aucuugaggcucucauggaaugguu

SEQ ID NO: 14530 - RNA, 25 nt, Artificial Sequence
  Synthetic Oligonucleotide
aucuugaggcucucauggaguggcu

SEQ ID NO: 14531 - RNA, 25 nt, Artificial Sequence
  Synthetic Oligonucleotide
aucuugagguucucauggaauggcu

SEQ ID NO: 14532 - RNA, 25 nt, Artificial Sequence
  Synthetic Oligonucleotide
aucuugaggcucucacggaauggcu

SEQ ID NO: 14533 - RNA, 25 nt, Artificial Sequence
  Synthetic Oligonucleotide
aucuugaggcucuaauggaauggcu

SEQ ID NO: 14534 - RNA, 25 nt, Artificial Sequence
  Synthetic Oligonucleotide
aucuugaggcacucauggaauggcu

SEQ ID NO: 14535 - RNA, 25 nt, Artificial Sequence
  Synthetic Oligonucleotide
aucuugaagcucucauggaauggcu

SEQ ID NO: 14536 - RNA, 25 nt, Artificial Sequence
  Synthetic Oligonucleotide
aucuugaugcucucauggaauggcu

SEQ ID NO: 14537 - RNA, 25 nt, Artificial Sequence
  Synthetic Oligonucleotide
aucuagaggcucucauggaauggcu

SEQ ID NO: 14538 - RNA, 25 nt, Artificial Sequence
  Synthetic Oligonucleotide
aucucgaggcucucauggaauggcu

SEQ ID NO: 14539 - RNA, 25 nt, Artificial Sequence
  Synthetic Oligonucleotide
accuugaggcucucauggaauggcu

SEQ ID NO: 14540 - RNA, 25 nt, Artificial Sequence
  Synthetic Oligonucleotide
aucuagaggcucucauggaguggcu

SEQ ID NO: 14541 - RNA, 25 nt, Artificial Sequence
  Synthetic Oligonucleotide
aucucgaggcucucauggaguggcu

SEQ ID NO: 14542 - RNA, 25 nt, Artificial Sequence
  Synthetic Oligonucleotide
accuugaggcucucauggaguggcu

SEQ ID NO: 14543 - RNA, 25 nt, Artificial Sequence
  Synthetic Oligonucleotide
aucuugagguucucacggaauggcu

SEQ ID NO: 14544 - RNA, 25 nt, Artificial Sequence
  Synthetic Oligonucleotide
aucucgaggcacucauggaauggcu

SEQ ID NO: 14545 - RNA, 25 nt, Artificial Sequence
  Synthetic Oligonucleotide
ucuugaggcucucauggaauggcug

SEQ ID NO: 14546 - RNA, 25 nt, Artificial Sequence
  Synthetic Oligonucleotide
ucuugaggcucucauggaaugguua

SEQ ID NO: 14547 - RNA, 25 nt, Artificial Sequence
  Synthetic Oligonucleotide
ucuugaggcucucauggaguggcua

SEQ ID NO: 14548 - RNA, 25 nt, Artificial Sequence
  Synthetic Oligonucleotide
ucuugagguucucauggaauggcua

SEQ ID NO: 14549 - RNA, 25 nt, Artificial Sequence
  Synthetic Oligonucleotide
ucuugaggcucucacggaauggcua

SEQ ID NO: 14550 - RNA, 25 nt, Artificial Sequence
  Synthetic Oligonucleotide
ucuugaggcucuaauggaauggcua

SEQ ID NO: 14551 - RNA, 25 nt, Artificial Sequence
  Synthetic Oligonucleotide
ucuugaggcacucauggaauggcua

SEQ ID NO: 14552 - RNA, 25 nt, Artificial Sequence
  Synthetic Oligonucleotide
ucuugaagcucucauggaauggcua

SEQ ID NO: 14553 - RNA, 25 nt, Artificial Sequence
  Synthetic Oligonucleotide
ucuugaugcucucauggaauggcua

SEQ ID NO: 14554 - RNA, 25 nt, Artificial Sequence
  Synthetic Oligonucleotide
ucuagaggcucucauggaauggcua

SEQ ID NO: 14555 - RNA, 25 nt, Artificial Sequence
  Synthetic Oligonucleotide
ucucgaggcucucauggaauggcua

SEQ ID NO: 14556 - RNA, 25 nt, Artificial Sequence
  Synthetic Oligonucleotide
ccuugaggcucucauggaauggcua

SEQ ID NO: 14557 - RNA, 25 nt, Artificial Sequence
  Synthetic Oligonucleotide
ucucgaggcucucauggaauggcug

SEQ ID NO: 14558 - RNA, 25 nt, Artificial Sequence
  Synthetic Oligonucleotide
ucuugagguucucacggaauggcua

SEQ ID NO: 14559 - RNA, 25 nt, Artificial Sequence
  Synthetic Oligonucleotide
ucucgaggcucucauggaguggcua

SEQ ID NO: 14560 - RNA, 25 nt, Artificial Sequence
  Synthetic Oligonucleotide
ccuugaggcucucauggaguggcua

SEQ ID NO: 14561 - RNA, 25 nt, Artificial Sequence
  Synthetic Oligonucleotide
ucuagaggcucucauggaguggcug

SEQ ID NO: 14562 - RNA, 25 nt, Artificial Sequence
  Synthetic Oligonucleotide
ucucgaggcucucauggaguggcug

SEQ ID NO: 14563 - RNA, 25 nt, Artificial Sequence
  Synthetic Oligonucleotide
ucucgaggcacucauggaauggcua

SEQ ID NO: 14564 - RNA, 25 nt, Artificial Sequence
  Synthetic Oligonucleotide
augggggugcagaugcaacgguuca

SEQ ID NO: 14565 - RNA, 25 nt, Artificial Sequence
  Synthetic Oligonucleotide
augggggugcagaugcagcgauuca

SEQ ID NO: 14566 - RNA, 25 nt, Artificial Sequence
  Synthetic Oligonucleotide
augggggugcaggugcaacgauuca

SEQ ID NO: 14567 - RNA, 25 nt, Artificial Sequence
  Synthetic Oligonucleotide
augggggugcagauacaacgauuca

SEQ ID NO: 14568 - RNA, 25 nt, Artificial Sequence
  Synthetic Oligonucleotide
augggggugcagauucaacgauuca

SEQ ID NO: 14569 - RNA, 25 nt, Artificial Sequence
  Synthetic Oligonucleotide
augggggugcaaaugcaacgauuca

SEQ ID NO: 14570 - RNA, 25 nt, Artificial Sequence
  Synthetic Oligonucleotide
augggguugcagaugcaacgauuca

SEQ ID NO: 14571 - RNA, 25 nt, Artificial Sequence
  Synthetic Oligonucleotide
augggagugcagaugcaacgauuca

SEQ ID NO: 14572 - RNA, 25 nt, Artificial Sequence
  Synthetic Oligonucleotide
augggagugcagaugcaacgguuca

SEQ ID NO: 14573 - RNA, 25 nt, Artificial Sequence
  Synthetic Oligonucleotide
augggagugcagaugcagcgauuca

SEQ ID NO: 14574 - RNA, 25 nt, Artificial Sequence
  Synthetic Oligonucleotide
augggagugcagaugcagcgguuca

SEQ ID NO: 14575 - RNA, 25 nt, Artificial Sequence
  Synthetic Oligonucleotide
augggagugcaaaugcaacgauuca

SEQ ID NO: 14576 - RNA, 25 nt, Artificial Sequence
  Synthetic Oligonucleotide
augggaguacagaugcaacgauuca

SEQ ID NO: 14577 - RNA, 25 nt, Artificial Sequence
  Synthetic Oligonucleotide
augggagugcagauacagcgauuca

SEQ ID NO: 14578 - RNA, 25 nt, Artificial Sequence
  Synthetic Oligonucleotide
augggagugcaaaugcagcgauuca

SEQ ID NO: 14579 - RNA, 25 nt, Artificial Sequence
  Synthetic Oligonucleotide
augggaguacagaugcagcgauuca

SEQ ID NO: 14580 - RNA, 25 nt, Artificial Sequence
  Synthetic Oligonucleotide
augggagugcaaaugcaucgauuca

SEQ ID NO: 14581 - RNA, 25 nt, Artificial Sequence
  Synthetic Oligonucleotide
ugggggugcagaugcaacgauucag

SEQ ID NO: 14582 - RNA, 25 nt, Artificial Sequence
  Synthetic Oligonucleotide
ugggggugcagaugcaacgguucaa

SEQ ID NO: 14583 - RNA, 25 nt, Artificial Sequence
  Synthetic Oligonucleotide
ugggggugcagaugcagcgauucaa

SEQ ID NO: 14584 - RNA, 25 nt, Artificial Sequence
  Synthetic Oligonucleotide
ugggggugcaggugcaacgauucaa

SEQ ID NO: 14585 - RNA, 25 nt, Artificial Sequence
  Synthetic Oligonucleotide
ugggggugcagauacaacgauucaa

SEQ ID NO: 14586 - RNA, 25 nt, Artificial Sequence
  Synthetic Oligonucleotide
ugggggugcagauucaacgauucaa

SEQ ID NO: 14587 - RNA, 25 nt, Artificial Sequence
  Synthetic Oligonucleotide
ugggggugcaaaugcaacgauucaa

SEQ ID NO: 14588 - RNA, 25 nt, Artificial Sequence
  Synthetic Oligonucleotide
ugggguugcagaugcaacgauucaa

SEQ ID NO: 14589 - RNA, 25 nt, Artificial Sequence
  Synthetic Oligonucleotide
ugggagugcagaugcaacgauucaa

SEQ ID NO: 14590 - RNA, 25 nt, Artificial Sequence
  Synthetic Oligonucleotide
ugggagugcagaugcaacgguucaa

SEQ ID NO: 14591 - RNA, 25 nt, Artificial Sequence
  Synthetic Oligonucleotide
ugggagugcagaugcagcgauucaa

SEQ ID NO: 14592 - RNA, 25 nt, Artificial Sequence
  Synthetic Oligonucleotide
ugggagugcagaugcagcgguucaa

SEQ ID NO: 14593 - RNA, 25 nt, Artificial Sequence
  Synthetic Oligonucleotide
ugggagugcaaaugcaacgauucaa

SEQ ID NO: 14594 - RNA, 25 nt, Artificial Sequence
  Synthetic Oligonucleotide
ugggaguacagaugcaacgauucaa

SEQ ID NO: 14595 - RNA, 25 nt, Artificial Sequence
  Synthetic Oligonucleotide
ugggagugcagauacagcgauucaa

SEQ ID NO: 14596 - RNA, 25 nt, Artificial Sequence
  Synthetic Oligonucleotide
ugggagugcaaaugcagcgauucaa

SEQ ID NO: 14597 - RNA, 25 nt, Artificial Sequence
  Synthetic Oligonucleotide
ugggaguacagaugcagcgauucaa

SEQ ID NO: 14598 - RNA, 25 nt, Artificial Sequence
  Synthetic Oligonucleotide
ugggagugcaaaugcaucgauucaa

SEQ ID NO: 14599 - RNA, 25 nt, Artificial Sequence
  Synthetic Oligonucleotide
uguucacgcucaccgugccuaguga

SEQ ID NO: 14600 - RNA, 25 nt, Artificial Sequence
  Synthetic Oligonucleotide
uguucacgcucaccgugcccaguaa

SEQ ID NO: 14601 - RNA, 25 nt, Artificial Sequence
  Synthetic Oligonucleotide
uguucacgcucaccgugcccagcga

SEQ ID NO: 14602 - RNA, 25 nt, Artificial Sequence
  Synthetic Oligonucleotide
uguucacgcucaccgugcccacuga

SEQ ID NO: 14603 - RNA, 25 nt, Artificial Sequence
  Synthetic Oligonucleotide
uguucacgcucacugugcccaguga

SEQ ID NO: 14604 - RNA, 25 nt, Artificial Sequence
  Synthetic Oligonucleotide
uguucacacucaccgugcccaguga

SEQ ID NO: 14605 - RNA, 25 nt, Artificial Sequence
  Synthetic Oligonucleotide
uguacacgcucaccgugcccaguga

SEQ ID NO: 14606 - RNA, 25 nt, Artificial Sequence
  Synthetic Oligonucleotide
uauucacgcucaccgugcccaguga

SEQ ID NO: 14607 - RNA, 25 nt, Artificial Sequence
  Synthetic Oligonucleotide
uauucacgcucaccgugccaaguga

SEQ ID NO: 14608 - RNA, 25 nt, Artificial Sequence
  Synthetic Oligonucleotide
agagacuugaagaugucuuugcagg

SEQ ID NO: 14609 - RNA, 25 nt, Artificial Sequence
  Synthetic Oligonucleotide
agagacuugaagaugucuuugcggg

SEQ ID NO: 14610 - RNA, 25 nt, Artificial Sequence
  Synthetic Oligonucleotide
agagacuugaagaugucuucgcugg

SEQ ID NO: 14611 - RNA, 25 nt, Artificial Sequence
  Synthetic Oligonucleotide
agagacuugaagauguuuuugcugg

SEQ ID NO: 14612 - RNA, 25 nt, Artificial Sequence
  Synthetic Oligonucleotide
agagacuugaggaugucuuugcugg

SEQ ID NO: 14613 - RNA, 25 nt, Artificial Sequence
  Synthetic Oligonucleotide
agaggcuugaagaugucuuugcugg

SEQ ID NO: 14614 - RNA, 25 nt, Artificial Sequence
  Synthetic Oligonucleotide
agagacuugaagauguauuugcugg

SEQ ID NO: 14615 - RNA, 25 nt, Artificial Sequence
  Synthetic Oligonucleotide
agagacuugaaaaugucuuugcugg

SEQ ID NO: 14616 - RNA, 25 nt, Artificial Sequence
  Synthetic Oligonucleotide
agagacuucaagaugucuuugcugg

SEQ ID NO: 14617 - RNA, 25 nt, Artificial Sequence
  Synthetic Oligonucleotide
agaaacuugaagaugucuuugcugg

SEQ ID NO: 14618 - RNA, 25 nt, Artificial Sequence
  Synthetic Oligonucleotide
agagacuugaagauguuuuugcagg

SEQ ID NO: 14619 - RNA, 25 nt, Artificial Sequence
  Synthetic Oligonucleotide
agagacuugaagauguauuugcagg

SEQ ID NO: 14620 - RNA, 25 nt, Artificial Sequence
  Synthetic Oligonucleotide
agagacuugaauaugucuuugccgg

SEQ ID NO: 14621 - RNA, 25 nt, Artificial Sequence
  Synthetic Oligonucleotide
agagacuggaagaugucuuugcagg

SEQ ID NO: 14622 - RNA, 25 nt, Artificial Sequence
  Synthetic Oligonucleotide
agaaacuugaagaugucuuugcagg

SEQ ID NO: 14623 - RNA, 25 nt, Artificial Sequence
  Synthetic Oligonucleotide
agagacuugaggauguuuuugcagg

SEQ ID NO: 14624 - RNA, 25 nt, Artificial Sequence
  Synthetic Oligonucleotide
agagacuggaaggugucuuugcagg

SEQ ID NO: 14625 - RNA, 25 nt, Artificial Sequence
  Synthetic Oligonucleotide
agaaacuugaagauguuuuugcagg

SEQ ID NO: 14626 - RNA, 25 nt, Artificial Sequence
  Synthetic Oligonucleotide
agaaacuugaggaugucuuugcagg

SEQ ID NO: 14627 - RNA, 25 nt, Artificial Sequence
  Synthetic Oligonucleotide
ggaaacuugaagaugucuuugcagg

SEQ ID NO: 14628 - RNA, 25 nt, Artificial Sequence
  Synthetic Oligonucleotide
agagacaagaagaugucuuugcagg

SEQ ID NO: 14629 - RNA, 25 nt, Artificial Sequence
  Synthetic Oligonucleotide
agaaacuugaagacgucuuugcagg

SEQ ID NO: 14630 - RNA, 25 nt, Artificial Sequence
  Synthetic Oligonucleotide
agagacuggaagguguuuuugcagg

SEQ ID NO: 14631 - RNA, 25 nt, Artificial Sequence
  Synthetic Oligonucleotide
agagacucgaagacguuuuugcagg

SEQ ID NO: 14632 - RNA, 25 nt, Artificial Sequence
  Synthetic Oligonucleotide
cagagacuugaagaugucuuugcag

SEQ ID NO: 14633 - RNA, 25 nt, Artificial Sequence
  Synthetic Oligonucleotide
cagagacuugaagaugucuuugcgg

SEQ ID NO: 14634 - RNA, 25 nt, Artificial Sequence
  Synthetic Oligonucleotide
cagagacuugaagaugucuucgcug

SEQ ID NO: 14635 - RNA, 25 nt, Artificial Sequence
  Synthetic Oligonucleotide
cagagacuugaagauguuuuugcug

SEQ ID NO: 14636 - RNA, 25 nt, Artificial Sequence
  Synthetic Oligonucleotide
cagagacuugaggaugucuuugcug

SEQ ID NO: 14637 - RNA, 25 nt, Artificial Sequence
  Synthetic Oligonucleotide
cagaggcuugaagaugucuuugcug

SEQ ID NO: 14638 - RNA, 25 nt, Artificial Sequence
  Synthetic Oligonucleotide
cagagacuugaagauguauuugcug

SEQ ID NO: 14639 - RNA, 25 nt, Artificial Sequence
  Synthetic Oligonucleotide
cagagacuugaaaaugucuuugcug

SEQ ID NO: 14640 - RNA, 25 nt, Artificial Sequence
  Synthetic Oligonucleotide
cagagacuucaagaugucuuugcug

SEQ ID NO: 14641 - RNA, 25 nt, Artificial Sequence
  Synthetic Oligonucleotide
cagaaacuugaagaugucuuugcug

SEQ ID NO: 14642 - RNA, 25 nt, Artificial Sequence
  Synthetic Oligonucleotide
cagagacuugaagauguuuuugcag

SEQ ID NO: 14643 - RNA, 25 nt, Artificial Sequence
  Synthetic Oligonucleotide
cagagacuugaagauguauuugcag

SEQ ID NO: 14644 - RNA, 25 nt, Artificial Sequence
  Synthetic Oligonucleotide
cagagacuugaauaugucuuugccg

SEQ ID NO: 14645 - RNA, 25 nt, Artificial Sequence
  Synthetic Oligonucleotide
cagagacuggaagaugucuuugcag

SEQ ID NO: 14646 - RNA, 25 nt, Artificial Sequence
  Synthetic Oligonucleotide
cagaaacuugaagaugucuuugcag

SEQ ID NO: 14647 - RNA, 25 nt, Artificial Sequence
  Synthetic Oligonucleotide
cagagacuugaggauguuuuugcag

SEQ ID NO: 14648 - RNA, 25 nt, Artificial Sequence
  Synthetic Oligonucleotide
cagagacuggaaggugucuuugcag

SEQ ID NO: 14649 - RNA, 25 nt, Artificial Sequence
  Synthetic Oligonucleotide
cagaaacuugaagauguuuuugcag

SEQ ID NO: 14650 - RNA, 25 nt, Artificial Sequence
  Synthetic Oligonucleotide
cagaaacuugaggaugucuuugcag

SEQ ID NO: 14651 - RNA, 25 nt, Artificial Sequence
  Synthetic Oligonucleotide
cggaaacuugaagaugucuuugcag

SEQ ID NO: 14652 - RNA, 25 nt, Artificial Sequence
  Synthetic Oligonucleotide
cagagacaagaagaugucuuugcag

SEQ ID NO: 14653 - RNA, 25 nt, Artificial Sequence
  Synthetic Oligonucleotide
cagaaacuugaagacgucuuugcag

SEQ ID NO: 14654 - RNA, 25 nt, Artificial Sequence
  Synthetic Oligonucleotide
cagagacuggaagguguuuuugcag

SEQ ID NO: 14655 - RNA, 25 nt, Artificial Sequence
  Synthetic Oligonucleotide
cagagacucgaagacguuuuugcag

SEQ ID NO: 14656 - RNA, 25 nt, Artificial Sequence
  Synthetic Oligonucleotide
guguucacgcucaccgugccuagug

SEQ ID NO: 14657 - RNA, 25 nt, Artificial Sequence
  Synthetic Oligonucleotide
guguucacgcucaccgugcccagua

SEQ ID NO: 14658 - RNA, 25 nt, Artificial Sequence
  Synthetic Oligonucleotide
guguucacgcucaccgugcccagcg

SEQ ID NO: 14659 - RNA, 25 nt, Artificial Sequence
  Synthetic Oligonucleotide
guguucacgcucaccgugcccacug

SEQ ID NO: 14660 - RNA, 25 nt, Artificial Sequence
  Synthetic Oligonucleotide
guguucacgcucacugugcccagug

SEQ ID NO: 14661 - RNA, 25 nt, Artificial Sequence
  Synthetic Oligonucleotide
guguucacacucaccgugcccagug

SEQ ID NO: 14662 - RNA, 25 nt, Artificial Sequence
  Synthetic Oligonucleotide
guguacacgcucaccgugcccagug

SEQ ID NO: 14663 - RNA, 25 nt, Artificial Sequence
  Synthetic Oligonucleotide
guauucacgcucaccgugcccagug

SEQ ID NO: 14664 - RNA, 25 nt, Artificial Sequence
  Synthetic Oligonucleotide
guauucacgcucaccgugccaagug

SEQ ID NO: 14665 - RNA, 25 nt, Artificial Sequence
  Synthetic Oligonucleotide
auauucacgcucaccgugcccagug

SEQ ID NO: 14666 - RNA, 25 nt, Artificial Sequence
  Synthetic Oligonucleotide
uuuguguucacgcucaccgugccua

SEQ ID NO: 14667 - RNA, 25 nt, Artificial Sequence
  Synthetic Oligonucleotide
uuuguguucacgcucacugugccca

SEQ ID NO: 14668 - RNA, 25 nt, Artificial Sequence
  Synthetic Oligonucleotide
uuuguguucacacucaccgugccca

SEQ ID NO: 14669 - RNA, 25 nt, Artificial Sequence
  Synthetic Oligonucleotide
uuuguguacacgcucaccgugccca

SEQ ID NO: 14670 - RNA, 25 nt, Artificial Sequence
  Synthetic Oligonucleotide
uuuguauucacgcucaccgugccca

SEQ ID NO: 14671 - RNA, 25 nt, Artificial Sequence
  Synthetic Oligonucleotide
uuaguguucacgcucaccgugccca

SEQ ID NO: 14672 - RNA, 25 nt, Artificial Sequence
  Synthetic Oligonucleotide
uucguguucacgcucaccgugccca

SEQ ID NO: 14673 - RNA, 25 nt, Artificial Sequence
  Synthetic Oligonucleotide
guuguguucacgcucaccgugccca

SEQ ID NO: 14674 - RNA, 25 nt, Artificial Sequence
  Synthetic Oligonucleotide
uuuguauucacgcucaccgugccaa

SEQ ID NO: 14675 - RNA, 25 nt, Artificial Sequence
  Synthetic Oligonucleotide
uuuauauucacgcucaccgugccca

SEQ ID NO: 14676 - RNA, 25 nt, Artificial Sequence
  Synthetic Oligonucleotide
uuaguauucacgcucaccgugccca

SEQ ID NO: 14677 - RNA, 25 nt, Artificial Sequence
  Synthetic Oligonucleotide
uuuguauucacgcucaccuguccca

SEQ ID NO: 14678 - RNA, 25 nt, Artificial Sequence
  Synthetic Oligonucleotide
guucacgcucaccgugcccagugaa

SEQ ID NO: 14679 - RNA, 25 nt, Artificial Sequence
  Synthetic Oligonucleotide
guucacgcucaccgugcccaguaag

SEQ ID NO: 14680 - RNA, 25 nt, Artificial Sequence
  Synthetic Oligonucleotide
guucacgcucaccgugcccagcgag

SEQ ID NO: 14681 - RNA, 25 nt, Artificial Sequence
  Synthetic Oligonucleotide
guucacgcucaccgugcccacugag

SEQ ID NO: 14682 - RNA, 25 nt, Artificial Sequence
  Synthetic Oligonucleotide
guucacgcucaccgugccuagugag

SEQ ID NO: 14683 - RNA, 25 nt, Artificial Sequence
  Synthetic Oligonucleotide
guucacgcucacugugcccagugag

SEQ ID NO: 14684 - RNA, 25 nt, Artificial Sequence
  Synthetic Oligonucleotide
guucacacucaccgugcccagugag

SEQ ID NO: 14685 - RNA, 25 nt, Artificial Sequence
  Synthetic Oligonucleotide
guacacgcucaccgugcccagugag

SEQ ID NO: 14686 - RNA, 25 nt, Artificial Sequence
  Synthetic Oligonucleotide
auucacgcucaccgugcccagugag

SEQ ID NO: 14687 - RNA, 25 nt, Artificial Sequence
  Synthetic Oligonucleotide
auucacgcucaccgugcccagugaa

SEQ ID NO: 14688 - RNA, 25 nt, Artificial Sequence
  Synthetic Oligonucleotide
auucacgcucaccgugccaagugag

SEQ ID NO: 14689 - RNA, 25 nt, Artificial Sequence
  Synthetic Oligonucleotide
uuguguucacgcucaccgugccuag

SEQ ID NO: 14690 - RNA, 25 nt, Artificial Sequence
  Synthetic Oligonucleotide
uuguguucacgcucaccgugcccac

SEQ ID NO: 14691 - RNA, 25 nt, Artificial Sequence
  Synthetic Oligonucleotide
uuguguucacgcucacugugcccag

SEQ ID NO: 14692 - RNA, 25 nt, Artificial Sequence
  Synthetic Oligonucleotide
uuguguucacacucaccgugcccag

SEQ ID NO: 14693 - RNA, 25 nt, Artificial Sequence
  Synthetic Oligonucleotide
uuguguacacgcucaccgugcccag

SEQ ID NO: 14694 - RNA, 25 nt, Artificial Sequence
  Synthetic Oligonucleotide
uuguauucacgcucaccgugcccag

SEQ ID NO: 14695 - RNA, 25 nt, Artificial Sequence
  Synthetic Oligonucleotide
uaguguucacgcucaccgugcccag

SEQ ID NO: 14696 - RNA, 25 nt, Artificial Sequence
  Synthetic Oligonucleotide
ucguguucacgcucaccgugcccag

SEQ ID NO: 14697 - RNA, 25 nt, Artificial Sequence
  Synthetic Oligonucleotide
uuguauucacgcucaccgugccaag

SEQ ID NO: 14698 - RNA, 25 nt, Artificial Sequence
  Synthetic Oligonucleotide
uuauauucacgcucaccgugcccag

SEQ ID NO: 14699 - RNA, 25 nt, Artificial Sequence
  Synthetic Oligonucleotide
uaguauucacgcucaccgugcccag

SEQ ID NO: 14700 - RNA, 25 nt, Artificial Sequence
  Synthetic Oligonucleotide
uuguauucacgcucaccugucccag

SEQ ID NO: 14701 - RNA, 25 nt, Artificial Sequence
  Synthetic Oligonucleotide
uguguucacgcucaccgugccuagu

SEQ ID NO: 14702 - RNA, 25 nt, Artificial Sequence
  Synthetic Oligonucleotide
uguguucacgcucaccgugcccagc

SEQ ID NO: 14703 - RNA, 25 nt, Artificial Sequence
  Synthetic Oligonucleotide
uguguucacgcucaccgugcccacu

SEQ ID NO: 14704 - RNA, 25 nt, Artificial Sequence
  Synthetic Oligonucleotide
uguguucacgcucacugugcccagu

SEQ ID NO: 14705 - RNA, 25 nt, Artificial Sequence
  Synthetic Oligonucleotide
uguguucacacucaccgugcccagu

SEQ ID NO: 14706 - RNA, 25 nt, Artificial Sequence
  Synthetic Oligonucleotide
uguguacacgcucaccgugcccagu

SEQ ID NO: 14707 - RNA, 25 nt, Artificial Sequence
  Synthetic Oligonucleotide
uguauucacgcucaccgugcccagu

SEQ ID NO: 14708 - RNA, 25 nt, Artificial Sequence
  Synthetic Oligonucleotide
aguguucacgcucaccgugcccagu

SEQ ID NO: 14709 - RNA, 25 nt, Artificial Sequence
  Synthetic Oligonucleotide
cguguucacgcucaccgugcccagu

SEQ ID NO: 14710 - RNA, 25 nt, Artificial Sequence
  Synthetic Oligonucleotide
uguauucacgcucaccgugccaagu

SEQ ID NO: 14711 - RNA, 25 nt, Artificial Sequence
  Synthetic Oligonucleotide
uauauucacgcucaccgugcccagu

SEQ ID NO: 14712 - RNA, 25 nt, Artificial Sequence
  Synthetic Oligonucleotide
aguauucacgcucaccgugcccagu

SEQ ID NO: 14713 - RNA, 25 nt, Artificial Sequence
  Synthetic Oligonucleotide
gaaugggggugcagaugcaacgguu

SEQ ID NO: 14714 - RNA, 25 nt, Artificial Sequence
  Synthetic Oligonucleotide
gaaugggggugcagaugcagcgauu

SEQ ID NO: 14715 - RNA, 25 nt, Artificial Sequence
  Synthetic Oligonucleotide
gaaugggggugcaggugcaacgauu

SEQ ID NO: 14716 - RNA, 25 nt, Artificial Sequence
  Synthetic Oligonucleotide
ggaugggggugcagaugcaacgauu

SEQ ID NO: 14717 - RNA, 25 nt, Artificial Sequence
  Synthetic Oligonucleotide
ggaugggggugcagaugcagcgauu

SEQ ID NO: 14718 - RNA, 25 nt, Artificial Sequence
  Synthetic Oligonucleotide
gaaugggggugcagauacaacgauu

SEQ ID NO: 14719 - RNA, 25 nt, Artificial Sequence
  Synthetic Oligonucleotide
gaaugggggugcagauucaacgauu

SEQ ID NO: 14720 - RNA, 25 nt, Artificial Sequence
  Synthetic Oligonucleotide
gaaugggggugcaaaugcaacgauu

SEQ ID NO: 14721 - RNA, 25 nt, Artificial Sequence
  Synthetic Oligonucleotide
gaaugggguugcagaugcaacgauu

SEQ ID NO: 14722 - RNA, 25 nt, Artificial Sequence
  Synthetic Oligonucleotide
gaaugggagugcagaugcaacgauu

SEQ ID NO: 14723 - RNA, 25 nt, Artificial Sequence
  Synthetic Oligonucleotide
gaaugggagugcagaugcaacgguu

SEQ ID NO: 14724 - RNA, 25 nt, Artificial Sequence
  Synthetic Oligonucleotide
gaaugggagugcagaugcagcgauu

SEQ ID NO: 14725 - RNA, 25 nt, Artificial Sequence
  Synthetic Oligonucleotide
ggaugggagugcagaugcagcgauu

SEQ ID NO: 14726 - RNA, 25 nt, Artificial Sequence
  Synthetic Oligonucleotide
ggaugggagugcagaugcagcgguu

SEQ ID NO: 14727 - RNA, 25 nt, Artificial Sequence
  Synthetic Oligonucleotide
gaaugggagugcaaaugcaacgauu

SEQ ID NO: 14728 - RNA, 25 nt, Artificial Sequence
  Synthetic Oligonucleotide
gaaugggaguacagaugcaacgauu

SEQ ID NO: 14729 - RNA, 25 nt, Artificial Sequence
  Synthetic Oligonucleotide
gaaugggaguacagaugcagcgauu

SEQ ID NO: 14730 - RNA, 25 nt, Artificial Sequence
  Synthetic Oligonucleotide
gaaugggagugcaaaugcaucgauu

SEQ ID NO: 14731 - RNA, 25 nt, Artificial Sequence
  Synthetic Oligonucleotide
ggaugggagugcaaaugcaacgauu

SEQ ID NO: 14732 - RNA, 25 nt, Artificial Sequence
  Synthetic Oligonucleotide
ggaugggagugcagauacagcgauu

SEQ ID NO: 14733 - RNA, 25 nt, Artificial Sequence
  Synthetic Oligonucleotide
ggaugggagugcaaaugcagcgauu

SEQ ID NO: 14734 - RNA, 25 nt, Artificial Sequence
  Synthetic Oligonucleotide
gaaugggaguacaaaugcagcgauu

SEQ ID NO: 14735 - RNA, 25 nt, Artificial Sequence
  Synthetic Oligonucleotide
ggaugggagugcaaaugcagagauu

SEQ ID NO: 14736 - RNA, 25 nt, Artificial Sequence
  Synthetic Oligonucleotide
aaugggggugcagaugcaacgguuc

SEQ ID NO: 14737 - RNA, 25 nt, Artificial Sequence
  Synthetic Oligonucleotide
aaugggggugcagaugcagcgauuc

SEQ ID NO: 14738 - RNA, 25 nt, Artificial Sequence
  Synthetic Oligonucleotide
aaugggggugcaggugcaacgauuc

SEQ ID NO: 14739 - RNA, 25 nt, Artificial Sequence
  Synthetic Oligonucleotide
gaugggggugcagaugcaacgauuc

SEQ ID NO: 14740 - RNA, 25 nt, Artificial Sequence
  Synthetic Oligonucleotide
aaugggggugcagauacaacgauuc

SEQ ID NO: 14741 - RNA, 25 nt, Artificial Sequence
  Synthetic Oligonucleotide
aaugggggugcagauucaacgauuc

SEQ ID NO: 14742 - RNA, 25 nt, Artificial Sequence
  Synthetic Oligonucleotide
aaugggggugcaaaugcaacgauuc

SEQ ID NO: 14743 - RNA, 25 nt, Artificial Sequence
  Synthetic Oligonucleotide
aaugggguugcagaugcaacgauuc

SEQ ID NO: 14744 - RNA, 25 nt, Artificial Sequence
  Synthetic Oligonucleotide
aaugggagugcagaugcaacgauuc

SEQ ID NO: 14745 - RNA, 25 nt, Artificial Sequence
  Synthetic Oligonucleotide
aaugggagugcagaugcaacgguuc

SEQ ID NO: 14746 - RNA, 25 nt, Artificial Sequence
  Synthetic Oligonucleotide
gaugggggugcagaugcagcgauuc

SEQ ID NO: 14747 - RNA, 25 nt, Artificial Sequence
  Synthetic Oligonucleotide
aaugggagugcagaugcagcgauuc

SEQ ID NO: 14748 - RNA, 25 nt, Artificial Sequence
  Synthetic Oligonucleotide
aaugggagugcaaaugcaacgauuc

SEQ ID NO: 14749 - RNA, 25 nt, Artificial Sequence
  Synthetic Oligonucleotide
aaugggaguacagaugcaacgauuc

SEQ ID NO: 14750 - RNA, 25 nt, Artificial Sequence
  Synthetic Oligonucleotide
gaugggagugcagaugcagcgauuc

SEQ ID NO: 14751 - RNA, 25 nt, Artificial Sequence
  Synthetic Oligonucleotide
gaugggagugcagaugcagcgguuc

SEQ ID NO: 14752 - RNA, 25 nt, Artificial Sequence
  Synthetic Oligonucleotide
aaugggaguacagaugcagcgauuc

SEQ ID NO: 14753 - RNA, 25 nt, Artificial Sequence
  Synthetic Oligonucleotide
gaugggagugcaaaugcaacgauuc

SEQ ID NO: 14754 - RNA, 25 nt, Artificial Sequence
  Synthetic Oligonucleotide
aaugggagugcaaaugcaucgauuc

SEQ ID NO: 14755 - RNA, 25 nt, Artificial Sequence
  Synthetic Oligonucleotide
cgaaugggggugcagaugcaacggu

SEQ ID NO: 14756 - RNA, 25 nt, Artificial Sequence
  Synthetic Oligonucleotide
cgaaugggggugcagaugcagcgau

SEQ ID NO: 14757 - RNA, 25 nt, Artificial Sequence
  Synthetic Oligonucleotide
cgaaugggggugcaggugcaacgau

SEQ ID NO: 14758 - RNA, 25 nt, Artificial Sequence
  Synthetic Oligonucleotide
cggaugggggugcagaugcaacgau

SEQ ID NO: 14759 - RNA, 25 nt, Artificial Sequence
  Synthetic Oligonucleotide
cggaugggggugcagaugcagcgau

SEQ ID NO: 14760 - RNA, 25 nt, Artificial Sequence
  Synthetic Oligonucleotide
cgaaugggggugcagauacaacgau

SEQ ID NO: 14761 - RNA, 25 nt, Artificial Sequence
  Synthetic Oligonucleotide
cgaaugggggugcagauucaacgau

SEQ ID NO: 14762 - RNA, 25 nt, Artificial Sequence
  Synthetic Oligonucleotide
cgaaugggggugcaaaugcaacgau

SEQ ID NO: 14763 - RNA, 25 nt, Artificial Sequence
  Synthetic Oligonucleotide
cgaaugggguugcagaugcaacgau

SEQ ID NO: 14764 - RNA, 25 nt, Artificial Sequence
  Synthetic Oligonucleotide
cgaaugggagugcagaugcaacgau

SEQ ID NO: 14765 - RNA, 25 nt, Artificial Sequence
  Synthetic Oligonucleotide
agaaugggggugcagaugcaacgau

SEQ ID NO: 14766 - RNA, 25 nt, Artificial Sequence
  Synthetic Oligonucleotide
cgaaugggagugcagaugcaacggu

SEQ ID NO: 14767 - RNA, 25 nt, Artificial Sequence
  Synthetic Oligonucleotide
cgaaugggagugcagaugcagcgau

SEQ ID NO: 14768 - RNA, 25 nt, Artificial Sequence
  Synthetic Oligonucleotide
cggaugggagugcagaugcagcgau

SEQ ID NO: 14769 - RNA, 25 nt, Artificial Sequence
  Synthetic Oligonucleotide
cggaugggagugcagaugcagcggu

SEQ ID NO: 14770 - RNA, 25 nt, Artificial Sequence
  Synthetic Oligonucleotide
cgaaugggagugcaaaugcaacgau

SEQ ID NO: 14771 - RNA, 25 nt, Artificial Sequence
  Synthetic Oligonucleotide
cgaaugggaguacagaugcaacgau

SEQ ID NO: 14772 - RNA, 25 nt, Artificial Sequence
  Synthetic Oligonucleotide
cgaaugggaguacagaugcagcgau

SEQ ID NO: 14773 - RNA, 25 nt, Artificial Sequence
  Synthetic Oligonucleotide
cgaaugggagugcaaaugcaucgau

SEQ ID NO: 14774 - RNA, 25 nt, Artificial Sequence
  Synthetic Oligonucleotide
cggaugggagugcaaaugcaacgau

SEQ ID NO: 14775 - RNA, 25 nt, Artificial Sequence
  Synthetic Oligonucleotide
cggaugggagugcagauacagcgau

SEQ ID NO: 14776 - RNA, 25 nt, Artificial Sequence
  Synthetic Oligonucleotide
cggaugggagugcaaaugcagcgau

SEQ ID NO: 14777 - RNA, 25 nt, Artificial Sequence
  Synthetic Oligonucleotide
cgaaugggaguacaaaugcagcgau

SEQ ID NO: 14778 - RNA, 25 nt, Artificial Sequence
  Synthetic Oligonucleotide
cggaugggagugcaaaugcagagau

SEQ ID NO: 14779 - RNA, 25 nt, Artificial Sequence
  Synthetic Oligonucleotide
cagaaacgaaugggggugcaggugc

SEQ ID NO: 14780 - RNA, 25 nt, Artificial Sequence
  Synthetic Oligonucleotide
cagaaacgaaugggggugcagauac

SEQ ID NO: 14781 - RNA, 25 nt, Artificial Sequence
  Synthetic Oligonucleotide
cagaaacgaaugggggugcagauuc

SEQ ID NO: 14782 - RNA, 25 nt, Artificial Sequence
  Synthetic Oligonucleotide
cagaaacgaaugggggugcaaaugc

SEQ ID NO: 14783 - RNA, 25 nt, Artificial Sequence
  Synthetic Oligonucleotide
cagaaacggaugggggugcagaugc

SEQ ID NO: 14784 - RNA, 25 nt, Artificial Sequence
  Synthetic Oligonucleotide
cagaagcgaaugggggugcagaugc

SEQ ID NO: 14785 - RNA, 25 nt, Artificial Sequence
  Synthetic Oligonucleotide
cagagacgaaugggggugcagaugc

SEQ ID NO: 14786 - RNA, 25 nt, Artificial Sequence
  Synthetic Oligonucleotide
cagaaacgaaugggguugcagaugc

SEQ ID NO: 14787 - RNA, 25 nt, Artificial Sequence
  Synthetic Oligonucleotide
cagaaacgaaugggagugcagaugc

SEQ ID NO: 14788 - RNA, 25 nt, Artificial Sequence
  Synthetic Oligonucleotide
cagaaaagaaugggggugcagaugc

SEQ ID NO: 14789 - RNA, 25 nt, Artificial Sequence
  Synthetic Oligonucleotide
caaaaacgaaugggggugcagaugc

SEQ ID NO: 14790 - RNA, 25 nt, Artificial Sequence
  Synthetic Oligonucleotide
cagaaacgaaugggagugcaaaugc

SEQ ID NO: 14791 - RNA, 25 nt, Artificial Sequence
  Synthetic Oligonucleotide
cagaaacggaugggagugcagaugc

SEQ ID NO: 14792 - RNA, 25 nt, Artificial Sequence
  Synthetic Oligonucleotide
cagaagcgaaugggagugcagaugc

SEQ ID NO: 14793 - RNA, 25 nt, Artificial Sequence
  Synthetic Oligonucleotide
caaaaacggaugggggugcagaugc

SEQ ID NO: 14794 - RNA, 25 nt, Artificial Sequence
  Synthetic Oligonucleotide
cagaaacgaaugggaguacagaugc

SEQ ID NO: 14795 - RNA, 25 nt, Artificial Sequence
  Synthetic Oligonucleotide
caaaaacgaaugggagugcagaugc

SEQ ID NO: 14796 - RNA, 25 nt, Artificial Sequence
  Synthetic Oligonucleotide
cagaaacggaugggagugcagauac

SEQ ID NO: 14797 - RNA, 25 nt, Artificial Sequence
  Synthetic Oligonucleotide
cagaaacggaugggagugcaaaugc

SEQ ID NO: 14798 - RNA, 25 nt, Artificial Sequence
  Synthetic Oligonucleotide
cagaaacgaaugggaguacaaaugc

SEQ ID NO: 14799 - RNA, 25 nt, Artificial Sequence
  Synthetic Oligonucleotide
caaaaacggaugggagugcagauac

SEQ ID NO: 14800 - RNA, 25 nt, Artificial Sequence
  Synthetic Oligonucleotide
agaaacgaaugggggugcaggugca

SEQ ID NO: 14801 - RNA, 25 nt, Artificial Sequence
  Synthetic Oligonucleotide
agaaacgaaugggggugcagauaca

SEQ ID NO: 14802 - RNA, 25 nt, Artificial Sequence
  Synthetic Oligonucleotide
agaaacgaaugggggugcagauuca

SEQ ID NO: 14803 - RNA, 25 nt, Artificial Sequence
  Synthetic Oligonucleotide
agaaacgaaugggggugcaaaugca

SEQ ID NO: 14804 - RNA, 25 nt, Artificial Sequence
  Synthetic Oligonucleotide
agaaacggaugggggugcagaugca

SEQ ID NO: 14805 - RNA, 25 nt, Artificial Sequence
  Synthetic Oligonucleotide
agaagcgaaugggggugcagaugca

SEQ ID NO: 14806 - RNA, 25 nt, Artificial Sequence
  Synthetic Oligonucleotide
agagacgaaugggggugcagaugca

SEQ ID NO: 14807 - RNA, 25 nt, Artificial Sequence
  Synthetic Oligonucleotide
agaaacgaaugggguugcagaugca

SEQ ID NO: 14808 - RNA, 25 nt, Artificial Sequence
  Synthetic Oligonucleotide
agaaacgaaugggagugcagaugca

SEQ ID NO: 14809 - RNA, 25 nt, Artificial Sequence
  Synthetic Oligonucleotide
agaaaagaaugggggugcagaugca

SEQ ID NO: 14810 - RNA, 25 nt, Artificial Sequence
  Synthetic Oligonucleotide
aaaaacgaaugggggugcagaugca

SEQ ID NO: 14811 - RNA, 25 nt, Artificial Sequence
  Synthetic Oligonucleotide
agaaacgaaugggagugcaaaugca

SEQ ID NO: 14812 - RNA, 25 nt, Artificial Sequence
  Synthetic Oligonucleotide
agaaacggaugggagugcagaugca

SEQ ID NO: 14813 - RNA, 25 nt, Artificial Sequence
  Synthetic Oligonucleotide
agaagcgaaugggagugcagaugca

SEQ ID NO: 14814 - RNA, 25 nt, Artificial Sequence
  Synthetic Oligonucleotide
aaaaacggaugggggugcagaugca

SEQ ID NO: 14815 - RNA, 25 nt, Artificial Sequence
  Synthetic Oligonucleotide
agaaacgaaugggaguacagaugca

SEQ ID NO: 14816 - RNA, 25 nt, Artificial Sequence
  Synthetic Oligonucleotide
aaaaacgaaugggagugcagaugca

SEQ ID NO: 14817 - RNA, 25 nt, Artificial Sequence
  Synthetic Oligonucleotide
agaaacggaugggagugcagauaca

SEQ ID NO: 14818 - RNA, 25 nt, Artificial Sequence
  Synthetic Oligonucleotide
agaaacggaugggagugcaaaugca

SEQ ID NO: 14819 - RNA, 25 nt, Artificial Sequence
  Synthetic Oligonucleotide
agaaacgaaugggaguacaaaugca

SEQ ID NO: 14820 - RNA, 25 nt, Artificial Sequence
  Synthetic Oligonucleotide
aaaaacggaugggagugcagauaca

SEQ ID NO: 14821 - RNA, 25 nt, Artificial Sequence
  Synthetic Oligonucleotide
aaacgaaugggggugcagaugcagc

SEQ ID NO: 14822 - RNA, 25 nt, Artificial Sequence
  Synthetic Oligonucleotide
aaacgaaugggggugcagauacaac

SEQ ID NO: 14823 - RNA, 25 nt, Artificial Sequence
  Synthetic Oligonucleotide
aaacgaaugggggugcagauucaac

SEQ ID NO: 14824 - RNA, 25 nt, Artificial Sequence
  Synthetic Oligonucleotide
aaacgaaugggggugcaggugcaac

SEQ ID NO: 14825 - RNA, 25 nt, Artificial Sequence
  Synthetic Oligonucleotide
aaacggaugggggugcagaugcaac

SEQ ID NO: 14826 - RNA, 25 nt, Artificial Sequence
  Synthetic Oligonucleotide
aagcgaaugggggugcagaugcaac

SEQ ID NO: 14827 - RNA, 25 nt, Artificial Sequence
  Synthetic Oligonucleotide
agacgaaugggggugcagaugcaac

SEQ ID NO: 14828 - RNA, 25 nt, Artificial Sequence
  Synthetic Oligonucleotide
aaacggaugggggugcagaugcagc

SEQ ID NO: 14829 - RNA, 25 nt, Artificial Sequence
  Synthetic Oligonucleotide
aaacgaaugggggugcaaaugcaac

SEQ ID NO: 14830 - RNA, 25 nt, Artificial Sequence
  Synthetic Oligonucleotide
aaacgaaugggguugcagaugcaac

SEQ ID NO: 14831 - RNA, 25 nt, Artificial Sequence
  Synthetic Oligonucleotide
aaacgaaugggagugcagaugcaac

SEQ ID NO: 14832 - RNA, 25 nt, Artificial Sequence
  Synthetic Oligonucleotide
aaaagaaugggggugcagaugcaac

SEQ ID NO: 14833 - RNA, 25 nt, Artificial Sequence
  Synthetic Oligonucleotide
aaacgaaugggagugcagaugcagc

SEQ ID NO: 14834 - RNA, 25 nt, Artificial Sequence
  Synthetic Oligonucleotide
aagcgaaugggagugcagaugcaac

SEQ ID NO: 14835 - RNA, 25 nt, Artificial Sequence
  Synthetic Oligonucleotide
aaacggaugggagugcagaugcagc

SEQ ID NO: 14836 - RNA, 25 nt, Artificial Sequence
  Synthetic Oligonucleotide
aaacgaaugggagugcaaaugcaac

SEQ ID NO: 14837 - RNA, 25 nt, Artificial Sequence
  Synthetic Oligonucleotide
aaacgaaugggaguacagaugcaac

SEQ ID NO: 14838 - RNA, 25 nt, Artificial Sequence
  Synthetic Oligonucleotide
aaacgaaugggaguacagaugcagc

SEQ ID NO: 14839 - RNA, 25 nt, Artificial Sequence
  Synthetic Oligonucleotide
aaacggaugggagugcagauacagc

SEQ ID NO: 14840 - RNA, 25 nt, Artificial Sequence
  Synthetic Oligonucleotide
aaacgaaugggagugcaaaugcauc

SEQ ID NO: 14841 - RNA, 25 nt, Artificial Sequence
  Synthetic Oligonucleotide
aaacggaugggagugcaaaugcaac

SEQ ID NO: 14842 - RNA, 25 nt, Artificial Sequence
  Synthetic Oligonucleotide
aaacggaugggagugcaaaugcagc

SEQ ID NO: 14843 - RNA, 25 nt, Artificial Sequence
  Synthetic Oligonucleotide
aagcgaaugggaguacagaugcagc

SEQ ID NO: 14844 - RNA, 25 nt, Artificial Sequence
  Synthetic Oligonucleotide
aaacgaaugggaguacaaaugcagc

SEQ ID NO: 14845 - RNA, 25 nt, Artificial Sequence
  Synthetic Oligonucleotide
aaacggaugggagugcaaaugcaga

SEQ ID NO: 14846 - RNA, 25 nt, Artificial Sequence
  Synthetic Oligonucleotide
aacgaaugggggugcagaugcagcg

SEQ ID NO: 14847 - RNA, 25 nt, Artificial Sequence
  Synthetic Oligonucleotide
aacgaaugggggugcagauacaacg

SEQ ID NO: 14848 - RNA, 25 nt, Artificial Sequence
  Synthetic Oligonucleotide
aacgaaugggggugcagauucaacg

SEQ ID NO: 14849 - RNA, 25 nt, Artificial Sequence
  Synthetic Oligonucleotide
aacgaaugggggugcaggugcaacg

SEQ ID NO: 14850 - RNA, 25 nt, Artificial Sequence
  Synthetic Oligonucleotide
aacggaugggggugcagaugcaacg

SEQ ID NO: 14851 - RNA, 25 nt, Artificial Sequence
  Synthetic Oligonucleotide
agcgaaugggggugcagaugcaacg

SEQ ID NO: 14852 - RNA, 25 nt, Artificial Sequence
  Synthetic Oligonucleotide
gacgaaugggggugcagaugcaacg

SEQ ID NO: 14853 - RNA, 25 nt, Artificial Sequence
  Synthetic Oligonucleotide
aacggaugggggugcagaugcagcg

SEQ ID NO: 14854 - RNA, 25 nt, Artificial Sequence
  Synthetic Oligonucleotide
aacgaaugggggugcaaaugcaacg

SEQ ID NO: 14855 - RNA, 25 nt, Artificial Sequence
  Synthetic Oligonucleotide
aacgaaugggguugcagaugcaacg

SEQ ID NO: 14856 - RNA, 25 nt, Artificial Sequence
  Synthetic Oligonucleotide
aacgaaugggagugcagaugcaacg

SEQ ID NO: 14857 - RNA, 25 nt, Artificial Sequence
  Synthetic Oligonucleotide
aaagaaugggggugcagaugcaacg

SEQ ID NO: 14858 - RNA, 25 nt, Artificial Sequence
  Synthetic Oligonucleotide
aacgaaugggagugcagaugcagcg

SEQ ID NO: 14859 - RNA, 25 nt, Artificial Sequence
  Synthetic Oligonucleotide
agcgaaugggagugcagaugcaacg

SEQ ID NO: 14860 - RNA, 25 nt, Artificial Sequence
  Synthetic Oligonucleotide
aacggaugggagugcagaugcagcg

SEQ ID NO: 14861 - RNA, 25 nt, Artificial Sequence
  Synthetic Oligonucleotide
aacgaaugggagugcaaaugcaacg

SEQ ID NO: 14862 - RNA, 25 nt, Artificial Sequence
  Synthetic Oligonucleotide
aacgaaugggaguacagaugcaacg

SEQ ID NO: 14863 - RNA, 25 nt, Artificial Sequence
  Synthetic Oligonucleotide
aacgaaugggaguacagaugcagcg

SEQ ID NO: 14864 - RNA, 25 nt, Artificial Sequence
  Synthetic Oligonucleotide
aacggaugggagugcagauacagcg

SEQ ID NO: 14865 - RNA, 25 nt, Artificial Sequence
  Synthetic Oligonucleotide
aacgaaugggagugcaaaugcaucg

SEQ ID NO: 14866 - RNA, 25 nt, Artificial Sequence
  Synthetic Oligonucleotide
aacggaugggagugcaaaugcaacg

SEQ ID NO: 14867 - RNA, 25 nt, Artificial Sequence
  Synthetic Oligonucleotide
aacggaugggagugcaaaugcagcg

SEQ ID NO: 14868 - RNA, 25 nt, Artificial Sequence
  Synthetic Oligonucleotide
agcgaaugggaguacagaugcagcg

SEQ ID NO: 14869 - RNA, 25 nt, Artificial Sequence
  Synthetic Oligonucleotide
aacgaaugggaguacaaaugcagcg

SEQ ID NO: 14870 - RNA, 25 nt, Artificial Sequence
  Synthetic Oligonucleotide
aacggaugggagugcaaaugcagag

SEQ ID NO: 14871 - RNA, 25 nt, Artificial Sequence
  Synthetic Oligonucleotide
gaaacgaaugggggugcagaugcag

SEQ ID NO: 14872 - RNA, 25 nt, Artificial Sequence
  Synthetic Oligonucleotide
gaaacgaaugggggugcaggugcaa

SEQ ID NO: 14873 - RNA, 25 nt, Artificial Sequence
  Synthetic Oligonucleotide
gaaacgaaugggggugcagauacaa

SEQ ID NO: 14874 - RNA, 25 nt, Artificial Sequence
  Synthetic Oligonucleotide
gaaacgaaugggggugcagauucaa

SEQ ID NO: 14875 - RNA, 25 nt, Artificial Sequence
  Synthetic Oligonucleotide
gaaacggaugggggugcagaugcaa

SEQ ID NO: 14876 - RNA, 25 nt, Artificial Sequence
  Synthetic Oligonucleotide
gaagcgaaugggggugcagaugcaa

SEQ ID NO: 14877 - RNA, 25 nt, Artificial Sequence
  Synthetic Oligonucleotide
gagacgaaugggggugcagaugcaa

SEQ ID NO: 14878 - RNA, 25 nt, Artificial Sequence
  Synthetic Oligonucleotide
gaaacggaugggggugcagaugcag

SEQ ID NO: 14879 - RNA, 25 nt, Artificial Sequence
  Synthetic Oligonucleotide
gaaacgaaugggggugcaaaugcaa

SEQ ID NO: 14880 - RNA, 25 nt, Artificial Sequence
  Synthetic Oligonucleotide
gaaacgaaugggguugcagaugcaa

SEQ ID NO: 14881 - RNA, 25 nt, Artificial Sequence
  Synthetic Oligonucleotide
gaaacgaaugggagugcagaugcaa

SEQ ID NO: 14882 - RNA, 25 nt, Artificial Sequence
  Synthetic Oligonucleotide
gaaaagaaugggggugcagaugcaa

SEQ ID NO: 14883 - RNA, 25 nt, Artificial Sequence
  Synthetic Oligonucleotide
aaaacgaaugggggugcagaugcaa

SEQ ID NO: 14884 - RNA, 25 nt, Artificial Sequence
  Synthetic Oligonucleotide
gaaacgaaugggagugcagaugcag

SEQ ID NO: 14885 - RNA, 25 nt, Artificial Sequence
  Synthetic Oligonucleotide
gaagcgaaugggagugcagaugcaa

SEQ ID NO: 14886 - RNA, 25 nt, Artificial Sequence
  Synthetic Oligonucleotide
gaaacggaugggagugcagaugcag

SEQ ID NO: 14887 - RNA, 25 nt, Artificial Sequence
  Synthetic Oligonucleotide
aaaacggaugggggugcagaugcag

SEQ ID NO: 14888 - RNA, 25 nt, Artificial Sequence
  Synthetic Oligonucleotide
gaaacgaaugggagugcaaaugcaa

SEQ ID NO: 14889 - RNA, 25 nt, Artificial Sequence
  Synthetic Oligonucleotide
gaaacgaaugggaguacagaugcaa

SEQ ID NO: 14890 - RNA, 25 nt, Artificial Sequence
  Synthetic Oligonucleotide
aaaacgaaugggagugcagaugcaa

SEQ ID NO: 14891 - RNA, 25 nt, Artificial Sequence
  Synthetic Oligonucleotide
gaaacgaaugggaguacagaugcag

SEQ ID NO: 14892 - RNA, 25 nt, Artificial Sequence
  Synthetic Oligonucleotide
aaaacgaaugggagugcagaugcag

SEQ ID NO: 14893 - RNA, 25 nt, Artificial Sequence
  Synthetic Oligonucleotide
gaaacggaugggagugcagauacag

SEQ ID NO: 14894 - RNA, 25 nt, Artificial Sequence
  Synthetic Oligonucleotide
gaaacgaaugggagugcaaaugcau

SEQ ID NO: 14895 - RNA, 25 nt, Artificial Sequence
  Synthetic Oligonucleotide
gaaacggaugggagugcaaaugcaa

SEQ ID NO: 14896 - RNA, 25 nt, Artificial Sequence
  Synthetic Oligonucleotide
gaaacggaugggagugcaaaugcag

SEQ ID NO: 14897 - RNA, 25 nt, Artificial Sequence
  Synthetic Oligonucleotide
gaaacgaaugggaguacaaaugcag

SEQ ID NO: 14898 - RNA, 25 nt, Artificial Sequence
  Synthetic Oligonucleotide
aaaacggaugggagugcagauacag

SEQ ID NO: 14899 - RNA, 25 nt, Artificial Sequence
  Synthetic Oligonucleotide
acgaaugggggugcagaugcaacgg

SEQ ID NO: 14900 - RNA, 25 nt, Artificial Sequence
  Synthetic Oligonucleotide
acgaaugggggugcagaugcagcga

SEQ ID NO: 14901 - RNA, 25 nt, Artificial Sequence
  Synthetic Oligonucleotide
acgaaugggggugcaggugcaacga

SEQ ID NO: 14902 - RNA, 25 nt, Artificial Sequence
  Synthetic Oligonucleotide
acggaugggggugcagaugcaacga

SEQ ID NO: 14903 - RNA, 25 nt, Artificial Sequence
  Synthetic Oligonucleotide
gcgaaugggggugcagaugcaacga

SEQ ID NO: 14904 - RNA, 25 nt, Artificial Sequence
  Synthetic Oligonucleotide
acggaugggggugcagaugcagcga

SEQ ID NO: 14905 - RNA, 25 nt, Artificial Sequence
  Synthetic Oligonucleotide
acgaaugggggugcagauacaacga

SEQ ID NO: 14906 - RNA, 25 nt, Artificial Sequence
  Synthetic Oligonucleotide
acgaaugggggugcagauucaacga

SEQ ID NO: 14907 - RNA, 25 nt, Artificial Sequence
  Synthetic Oligonucleotide
acgaaugggggugcaaaugcaacga

SEQ ID NO: 14908 - RNA, 25 nt, Artificial Sequence
  Synthetic Oligonucleotide
acgaaugggguugcagaugcaacga

SEQ ID NO: 14909 - RNA, 25 nt, Artificial Sequence
  Synthetic Oligonucleotide
acgaaugggagugcagaugcaacga

SEQ ID NO: 14910 - RNA, 25 nt, Artificial Sequence
  Synthetic Oligonucleotide
aagaaugggggugcagaugcaacga

SEQ ID NO: 14911 - RNA, 25 nt, Artificial Sequence
  Synthetic Oligonucleotide
acgaaugggagugcagaugcaacgg

SEQ ID NO: 14912 - RNA, 25 nt, Artificial Sequence
  Synthetic Oligonucleotide
acgaaugggagugcagaugcagcga

SEQ ID NO: 14913 - RNA, 25 nt, Artificial Sequence
  Synthetic Oligonucleotide
gcgaaugggagugcagaugcaacga

SEQ ID NO: 14914 - RNA, 25 nt, Artificial Sequence
  Synthetic Oligonucleotide
acggaugggagugcagaugcagcga

SEQ ID NO: 14915 - RNA, 25 nt, Artificial Sequence
  Synthetic Oligonucleotide
acggaugggagugcagaugcagcgg

SEQ ID NO: 14916 - RNA, 25 nt, Artificial Sequence
  Synthetic Oligonucleotide
acgaaugggagugcaaaugcaacga

SEQ ID NO: 14917 - RNA, 25 nt, Artificial Sequence
  Synthetic Oligonucleotide
acgaaugggaguacagaugcaacga

SEQ ID NO: 14918 - RNA, 25 nt, Artificial Sequence
  Synthetic Oligonucleotide
acgaaugggaguacagaugcagcga

SEQ ID NO: 14919 - RNA, 25 nt, Artificial Sequence
  Synthetic Oligonucleotide
acgaaugggagugcaaaugcaucga

SEQ ID NO: 14920 - RNA, 25 nt, Artificial Sequence
  Synthetic Oligonucleotide
acggaugggagugcaaaugcaacga

SEQ ID NO: 14921 - RNA, 25 nt, Artificial Sequence
  Synthetic Oligonucleotide
acggaugggagugcagauacagcga

SEQ ID NO: 14922 - RNA, 25 nt, Artificial Sequence
  Synthetic Oligonucleotide
acggaugggagugcaaaugcagcga

SEQ ID NO: 14923 - RNA, 25 nt, Artificial Sequence
  Synthetic Oligonucleotide
gcgaaugggaguacagaugcagcga

SEQ ID NO: 14924 - RNA, 25 nt, Artificial Sequence
  Synthetic Oligonucleotide
acgaaugggaguacaaaugcagcga

SEQ ID NO: 14925 - RNA, 25 nt, Artificial Sequence
  Synthetic Oligonucleotide
acggaugggagugcaaaugcagaga

SEQ ID NO: 14926 - RNA, 25 nt, Artificial Sequence
  Synthetic Oligonucleotide
cuaaggcuauggagcaaauggcagg

SEQ ID NO: 14927 - RNA, 25 nt, Artificial Sequence
  Synthetic Oligonucleotide
cuaaggcuauggagcagauggcugg

SEQ ID NO: 14928 - RNA, 25 nt, Artificial Sequence
  Synthetic Oligonucleotide
cuaaggcuauggagcacauggcugg

SEQ ID NO: 14929 - RNA, 25 nt, Artificial Sequence
  Synthetic Oligonucleotide
cuaaggcuauggaacaaauggcugg

SEQ ID NO: 14930 - RNA, 25 nt, Artificial Sequence
  Synthetic Oligonucleotide
cuaaggccauggagcaaauggcugg

SEQ ID NO: 14931 - RNA, 25 nt, Artificial Sequence
  Synthetic Oligonucleotide
cuaaagcuauggagcaaauggcugg

SEQ ID NO: 14932 - RNA, 25 nt, Artificial Sequence
  Synthetic Oligonucleotide
ccaaggcuauggagcaaauggcugg

SEQ ID NO: 14933 - RNA, 25 nt, Artificial Sequence
  Synthetic Oligonucleotide
cuaaggcuauggagcagauggcagg

SEQ ID NO: 14934 - RNA, 25 nt, Artificial Sequence
  Synthetic Oligonucleotide
cuaaggcuauggagcagauggcggg

SEQ ID NO: 14935 - RNA, 25 nt, Artificial Sequence
  Synthetic Oligonucleotide
cuaaagcuauggagcaaauggcagg

SEQ ID NO: 14936 - RNA, 25 nt, Artificial Sequence
  Synthetic Oligonucleotide
cuaaggcuauggaacagauggcugg

SEQ ID NO: 14937 - RNA, 25 nt, Artificial Sequence
  Synthetic Oligonucleotide
cuaaggccauggagcagauggcugg

SEQ ID NO: 14938 - RNA, 25 nt, Artificial Sequence
  Synthetic Oligonucleotide
cuaaggcuauggaacagaugguugg

SEQ ID NO: 14939 - RNA, 25 nt, Artificial Sequence
  Synthetic Oligonucleotide
cuaaggccauggaacaaauggcugg

SEQ ID NO: 14940 - RNA, 25 nt, Artificial Sequence
  Synthetic Oligonucleotide
cuaaagccauggagcaaauggcugg

SEQ ID NO: 14941 - RNA, 25 nt, Artificial Sequence
  Synthetic Oligonucleotide
cuaaagcgauggagcaaauggcugg

SEQ ID NO: 14942 - RNA, 25 nt, Artificial Sequence
  Synthetic Oligonucleotide
cuuaugcuauggagcaaauggcugg

SEQ ID NO: 14943 - RNA, 25 nt, Artificial Sequence
  Synthetic Oligonucleotide
ccaaggcuauggaacaaauggcugg

SEQ ID NO: 14944 - RNA, 25 nt, Artificial Sequence
  Synthetic Oligonucleotide
cuaaggccauggagcagauggcagg

SEQ ID NO: 14945 - RNA, 25 nt, Artificial Sequence
  Synthetic Oligonucleotide
cuaaagcuauggagcagauggcggg

SEQ ID NO: 14946 - RNA, 25 nt, Artificial Sequence
  Synthetic Oligonucleotide
cgaaggcuauggagcagauggcggg

SEQ ID NO: 14947 - RNA, 25 nt, Artificial Sequence
  Synthetic Oligonucleotide
cuaaagccauggagcaaauggcagg

SEQ ID NO: 14948 - RNA, 25 nt, Artificial Sequence
  Synthetic Oligonucleotide
cuaaagccauggaacaaauggcugg

SEQ ID NO: 14949 - RNA, 25 nt, Artificial Sequence
  Synthetic Oligonucleotide
cuaaggccauggaacagauggccgg

SEQ ID NO: 14950 - RNA, 25 nt, Artificial Sequence
  Synthetic Oligonucleotide
gcuaaggcuauggagcaaauggcag

SEQ ID NO: 14951 - RNA, 25 nt, Artificial Sequence
  Synthetic Oligonucleotide
gcuaaggcuauggagcagauggcug

SEQ ID NO: 14952 - RNA, 25 nt, Artificial Sequence
  Synthetic Oligonucleotide
gcuaaggcuauggagcacauggcug

SEQ ID NO: 14953 - RNA, 25 nt, Artificial Sequence
  Synthetic Oligonucleotide
gcuaaggcuauggaacaaauggcug

SEQ ID NO: 14954 - RNA, 25 nt, Artificial Sequence
  Synthetic Oligonucleotide
gcuaaggccauggagcaaauggcug

SEQ ID NO: 14955 - RNA, 25 nt, Artificial Sequence
  Synthetic Oligonucleotide
gcuaaagcuauggagcaaauggcug

SEQ ID NO: 14956 - RNA, 25 nt, Artificial Sequence
  Synthetic Oligonucleotide
gccaaggcuauggagcaaauggcug

SEQ ID NO: 14957 - RNA, 25 nt, Artificial Sequence
  Synthetic Oligonucleotide
gcuaaggcuauggagcagauggcag

SEQ ID NO: 14958 - RNA, 25 nt, Artificial Sequence
  Synthetic Oligonucleotide
gcuaaggcuauggagcagauggcgg

SEQ ID NO: 14959 - RNA, 25 nt, Artificial Sequence
  Synthetic Oligonucleotide
gcuaaagcuauggagcaaauggcag

SEQ ID NO: 14960 - RNA, 25 nt, Artificial Sequence
  Synthetic Oligonucleotide
gcuaaggcuauggaacagauggcug

SEQ ID NO: 14961 - RNA, 25 nt, Artificial Sequence
  Synthetic Oligonucleotide
gcuaaggccauggagcagauggcug

SEQ ID NO: 14962 - RNA, 25 nt, Artificial Sequence
  Synthetic Oligonucleotide
gcuaaggcuauggaacagaugguug

SEQ ID NO: 14963 - RNA, 25 nt, Artificial Sequence
  Synthetic Oligonucleotide
gcuaaggccauggaacaaauggcug

SEQ ID NO: 14964 - RNA, 25 nt, Artificial Sequence
  Synthetic Oligonucleotide
gcuaaagccauggagcaaauggcug

SEQ ID NO: 14965 - RNA, 25 nt, Artificial Sequence
  Synthetic Oligonucleotide
gcuaaagcgauggagcaaauggcug

SEQ ID NO: 14966 - RNA, 25 nt, Artificial Sequence
  Synthetic Oligonucleotide
gcuuaugcuauggagcaaauggcug

SEQ ID NO: 14967 - RNA, 25 nt, Artificial Sequence
  Synthetic Oligonucleotide
gccaaggcuauggaacaaauggcug

SEQ ID NO: 14968 - RNA, 25 nt, Artificial Sequence
  Synthetic Oligonucleotide
gcuaaggccauggagcagauggcag

SEQ ID NO: 14969 - RNA, 25 nt, Artificial Sequence
  Synthetic Oligonucleotide
gcuaaagcuauggagcagauggcgg

SEQ ID NO: 14970 - RNA, 25 nt, Artificial Sequence
  Synthetic Oligonucleotide
gcgaaggcuauggagcagauggcgg

SEQ ID NO: 14971 - RNA, 25 nt, Artificial Sequence
  Synthetic Oligonucleotide
gcuaaagccauggagcaaauggcag

SEQ ID NO: 14972 - RNA, 25 nt, Artificial Sequence
  Synthetic Oligonucleotide
gcuaaagccauggaacaaauggcug

SEQ ID NO: 14973 - RNA, 25 nt, Artificial Sequence
  Synthetic Oligonucleotide
gcuaaggccauggaacagauggccg

SEQ ID NO: 14974 - RNA, 25 nt, Artificial Sequence
  Synthetic Oligonucleotide
cagcuaaggcuauggagcagauggc

SEQ ID NO: 14975 - RNA, 25 nt, Artificial Sequence
  Synthetic Oligonucleotide
cagcuaaggcuauggagcacauggc

SEQ ID NO: 14976 - RNA, 25 nt, Artificial Sequence
  Synthetic Oligonucleotide
cggcuaaggcuauggagcaaauggc

SEQ ID NO: 14977 - RNA, 25 nt, Artificial Sequence
  Synthetic Oligonucleotide
cggcuaaggcuauggagcagauggc

SEQ ID NO: 14978 - RNA, 25 nt, Artificial Sequence
  Synthetic Oligonucleotide
cagcuaaggcuauggaacaaauggc

SEQ ID NO: 14979 - RNA, 25 nt, Artificial Sequence
  Synthetic Oligonucleotide
cagcuaaggccauggagcaaauggc

SEQ ID NO: 14980 - RNA, 25 nt, Artificial Sequence
  Synthetic Oligonucleotide
cagcuaaagcuauggagcaaauggc

SEQ ID NO: 14981 - RNA, 25 nt, Artificial Sequence
  Synthetic Oligonucleotide
cagccaaggcuauggagcaaauggc

SEQ ID NO: 14982 - RNA, 25 nt, Artificial Sequence
  Synthetic Oligonucleotide
ccgcuaaggcuauggagcaaauggc

SEQ ID NO: 14983 - RNA, 25 nt, Artificial Sequence
  Synthetic Oligonucleotide
cagcuaaggcuauggaacagauggc

SEQ ID NO: 14984 - RNA, 25 nt, Artificial Sequence
  Synthetic Oligonucleotide
cagcuaaagcuauggagcagauggc

SEQ ID NO: 14985 - RNA, 25 nt, Artificial Sequence
  Synthetic Oligonucleotide
cagcgaaggcuauggagcagauggc

SEQ ID NO: 14986 - RNA, 25 nt, Artificial Sequence
  Synthetic Oligonucleotide
cagcuaaggcuauggaacagauggu

SEQ ID NO: 14987 - RNA, 25 nt, Artificial Sequence
  Synthetic Oligonucleotide
cggcuaaggccauggagcaaauggc

SEQ ID NO: 14988 - RNA, 25 nt, Artificial Sequence
  Synthetic Oligonucleotide
cggcuaaggccauggagcagauggc

SEQ ID NO: 14989 - RNA, 25 nt, Artificial Sequence
  Synthetic Oligonucleotide
cagcuaaggccauggaacaaauggc

SEQ ID NO: 14990 - RNA, 25 nt, Artificial Sequence
  Synthetic Oligonucleotide
cagcuaaagccauggagcaaauggc

SEQ ID NO: 14991 - RNA, 25 nt, Artificial Sequence
  Synthetic Oligonucleotide
cagcuaaagcgauggagcaaauggc

SEQ ID NO: 14992 - RNA, 25 nt, Artificial Sequence
  Synthetic Oligonucleotide
cagcuuaugcuauggagcaaauggc

SEQ ID NO: 14993 - RNA, 25 nt, Artificial Sequence
  Synthetic Oligonucleotide
cagccaaggcuauggaacaaauggc

SEQ ID NO: 14994 - RNA, 25 nt, Artificial Sequence
  Synthetic Oligonucleotide
cagcuaaggccauggaacagauggc

SEQ ID NO: 14995 - RNA, 25 nt, Artificial Sequence
  Synthetic Oligonucleotide
cggcuaaagccauggagcaaauggc

SEQ ID NO: 14996 - RNA, 25 nt, Artificial Sequence
  Synthetic Oligonucleotide
cagcuaaagccauggaacaaauggc

SEQ ID NO: 14997 - RNA, 25 nt, Artificial Sequence
  Synthetic Oligonucleotide
acagcuaaggcuauggagcagaugg

SEQ ID NO: 14998 - RNA, 25 nt, Artificial Sequence
  Synthetic Oligonucleotide
acagcuaaggcuauggagcacaugg

SEQ ID NO: 14999 - RNA, 25 nt, Artificial Sequence
  Synthetic Oligonucleotide
acggcuaaggcuauggagcaaaugg

SEQ ID NO: 15000 - RNA, 25 nt, Artificial Sequence
  Synthetic Oligonucleotide
acggcuaaggcuauggagcagaugg

SEQ ID NO: 15001 - RNA, 25 nt, Artificial Sequence
  Synthetic Oligonucleotide
acagcuaaggcuauggaacaaaugg

SEQ ID NO: 15002 - RNA, 25 nt, Artificial Sequence
  Synthetic Oligonucleotide
acagcuaaggccauggagcaaaugg

SEQ ID NO: 15003 - RNA, 25 nt, Artificial Sequence
  Synthetic Oligonucleotide
acagcuaaagcuauggagcaaaugg

SEQ ID NO: 15004 - RNA, 25 nt, Artificial Sequence
  Synthetic Oligonucleotide
acagccaaggcuauggagcaaaugg

SEQ ID NO: 15005 - RNA, 25 nt, Artificial Sequence
  Synthetic Oligonucleotide
accgcuaaggcuauggagcaaaugg

SEQ ID NO: 15006 - RNA, 25 nt, Artificial Sequence
  Synthetic Oligonucleotide
acagcuaaggcuauggaacagaugg

SEQ ID NO: 15007 - RNA, 25 nt, Artificial Sequence
  Synthetic Oligonucleotide
acagcuaaagcuauggagcagaugg

SEQ ID NO: 15008 - RNA, 25 nt, Artificial Sequence
  Synthetic Oligonucleotide
acagcgaaggcuauggagcagaugg

SEQ ID NO: 15009 - RNA, 25 nt, Artificial Sequence
  Synthetic Oligonucleotide
acggcuaaggccauggagcaaaugg

SEQ ID NO: 15010 - RNA, 25 nt, Artificial Sequence
  Synthetic Oligonucleotide
acggcuaaggccauggagcagaugg

SEQ ID NO: 15011 - RNA, 25 nt, Artificial Sequence
  Synthetic Oligonucleotide
acagcuaaggccauggaacaaaugg

SEQ ID NO: 15012 - RNA, 25 nt, Artificial Sequence
  Synthetic Oligonucleotide
acagcuaaagccauggagcaaaugg

SEQ ID NO: 15013 - RNA, 25 nt, Artificial Sequence
  Synthetic Oligonucleotide
acagcuaaagcgauggagcaaaugg

SEQ ID NO: 15014 - RNA, 25 nt, Artificial Sequence
  Synthetic Oligonucleotide
acagcuuaugcuauggagcaaaugg

SEQ ID NO: 15015 - RNA, 25 nt, Artificial Sequence
  Synthetic Oligonucleotide
acagccaaggcuauggaacaaaugg

SEQ ID NO: 15016 - RNA, 25 nt, Artificial Sequence
  Synthetic Oligonucleotide
acagcuaaggccauggaacagaugg

SEQ ID NO: 15017 - RNA, 25 nt, Artificial Sequence
  Synthetic Oligonucleotide
acggcuaaagccauggagcaaaugg

SEQ ID NO: 15018 - RNA, 25 nt, Artificial Sequence
  Synthetic Oligonucleotide
acagcuaaagccauggaacaaaugg

SEQ ID NO: 15019 - RNA, 25 nt, Artificial Sequence
  Synthetic Oligonucleotide
uacagcuaaggcuauggagcagaug

SEQ ID NO: 15020 - RNA, 25 nt, Artificial Sequence
  Synthetic Oligonucleotide
uacagcuaaggcuauggagcacaug

SEQ ID NO: 15021 - RNA, 25 nt, Artificial Sequence
  Synthetic Oligonucleotide
uacggcuaaggcuauggagcaaaug

SEQ ID NO: 15022 - RNA, 25 nt, Artificial Sequence
  Synthetic Oligonucleotide
uacggcuaaggcuauggagcagaug

SEQ ID NO: 15023 - RNA, 25 nt, Artificial Sequence
  Synthetic Oligonucleotide
uacagcuaaggcuauggaacaaaug

SEQ ID NO: 15024 - RNA, 25 nt, Artificial Sequence
  Synthetic Oligonucleotide
uacagcuaaggccauggagcaaaug

SEQ ID NO: 15025 - RNA, 25 nt, Artificial Sequence
  Synthetic Oligonucleotide
uacagcuaaagcuauggagcaaaug

SEQ ID NO: 15026 - RNA, 25 nt, Artificial Sequence
  Synthetic Oligonucleotide
uacagccaaggcuauggagcaaaug

SEQ ID NO: 15027 - RNA, 25 nt, Artificial Sequence
  Synthetic Oligonucleotide
uaccgcuaaggcuauggagcaaaug

SEQ ID NO: 15028 - RNA, 25 nt, Artificial Sequence
  Synthetic Oligonucleotide
aacagcuaaggcuauggagcaaaug

SEQ ID NO: 15029 - RNA, 25 nt, Artificial Sequence
  Synthetic Oligonucleotide
cacagcuaaggcuauggagcaaaug

SEQ ID NO: 15030 - RNA, 25 nt, Artificial Sequence
  Synthetic Oligonucleotide
uacagcuaaggcuauggaacagaug

SEQ ID NO: 15031 - RNA, 25 nt, Artificial Sequence
  Synthetic Oligonucleotide
uacagcuaaagcuauggagcagaug

SEQ ID NO: 15032 - RNA, 25 nt, Artificial Sequence
  Synthetic Oligonucleotide
uacagcgaaggcuauggagcagaug

SEQ ID NO: 15033 - RNA, 25 nt, Artificial Sequence
  Synthetic Oligonucleotide
uacggcuaaggccauggagcaaaug

SEQ ID NO: 15034 - RNA, 25 nt, Artificial Sequence
  Synthetic Oligonucleotide
uacggcuaaggccauggagcagaug

SEQ ID NO: 15035 - RNA, 25 nt, Artificial Sequence
  Synthetic Oligonucleotide
uacagcuaaagccauggagcaaaug

SEQ ID NO: 15036 - RNA, 25 nt, Artificial Sequence
  Synthetic Oligonucleotide
uacagcuaaagcgauggagcaaaug

SEQ ID NO: 15037 - RNA, 25 nt, Artificial Sequence
  Synthetic Oligonucleotide
uacagcuuaugcuauggagcaaaug

SEQ ID NO: 15038 - RNA, 25 nt, Artificial Sequence
  Synthetic Oligonucleotide
uacagccaaggcuauggaacaaaug

SEQ ID NO: 15039 - RNA, 25 nt, Artificial Sequence
  Synthetic Oligonucleotide
uacagcuaaggccauggaacagaug

SEQ ID NO: 15040 - RNA, 25 nt, Artificial Sequence
  Synthetic Oligonucleotide
cacagcuaaggcuauggaacagaug

SEQ ID NO: 15041 - RNA, 25 nt, Artificial Sequence
  Synthetic Oligonucleotide
cacggcuaaggccauggagcagaug

SEQ ID NO: 15042 - RNA, 25 nt, Artificial Sequence
  Synthetic Oligonucleotide
aacagcuaaggccauggaacaaaug

SEQ ID NO: 15043 - RNA, 25 nt, Artificial Sequence
  Synthetic Oligonucleotide
ccuaucagaaacgaaugggguugca

SEQ ID NO: 15044 - RNA, 25 nt, Artificial Sequence
  Synthetic Oligonucleotide
ccuaucagaaacgaaugggagugca

SEQ ID NO: 15045 - RNA, 25 nt, Artificial Sequence
  Synthetic Oligonucleotide
ccuaucagaaacgaaugggaguaca

SEQ ID NO: 15046 - RNA, 25 nt, Artificial Sequence
  Synthetic Oligonucleotide
ccuaucagaaacggaugggggugca

SEQ ID NO: 15047 - RNA, 25 nt, Artificial Sequence
  Synthetic Oligonucleotide
ccuaucagaagcgaaugggggugca

SEQ ID NO: 15048 - RNA, 25 nt, Artificial Sequence
  Synthetic Oligonucleotide
ccuaucagagacgaaugggggugca

SEQ ID NO: 15049 - RNA, 25 nt, Artificial Sequence
  Synthetic Oligonucleotide
ccuaucagaaaagaaugggggugca

SEQ ID NO: 15050 - RNA, 25 nt, Artificial Sequence
  Synthetic Oligonucleotide
ccuaucaaaaacgaaugggggugca

SEQ ID NO: 15051 - RNA, 25 nt, Artificial Sequence
  Synthetic Oligonucleotide
ccuaccagaaacgaaugggggugca

SEQ ID NO: 15052 - RNA, 25 nt, Artificial Sequence
  Synthetic Oligonucleotide
ccuaucagaaacggaugggagugca

SEQ ID NO: 15053 - RNA, 25 nt, Artificial Sequence
  Synthetic Oligonucleotide
ccuaucagaagcgaaugggagugca

SEQ ID NO: 15054 - RNA, 25 nt, Artificial Sequence
  Synthetic Oligonucleotide
ccuaucaaaaacgaaugggagugca

SEQ ID NO: 15055 - RNA, 25 nt, Artificial Sequence
  Synthetic Oligonucleotide
ccuaccagaaacgaaugggagugca

SEQ ID NO: 15056 - RNA, 25 nt, Artificial Sequence
  Synthetic Oligonucleotide
cuuaucagaagcgaaugggggugca

SEQ ID NO: 15057 - RNA, 25 nt, Artificial Sequence
  Synthetic Oligonucleotide
ccuaccagaaacggaugggagugca

SEQ ID NO: 15058 - RNA, 25 nt, Artificial Sequence
  Synthetic Oligonucleotide
ccuaccaaaaacgaaugggagugca

SEQ ID NO: 15059 - RNA, 25 nt, Artificial Sequence
  Synthetic Oligonucleotide
cauaccagaaacgaaugggagugca

SEQ ID NO: 15060 - RNA, 25 nt, Artificial Sequence
  Synthetic Oligonucleotide
ccuaucaaaagcgaaugggaguaca

SEQ ID NO: 15061 - RNA, 25 nt, Artificial Sequence
  Synthetic Oligonucleotide
cuuaccagaaacggaugggggugca

SEQ ID NO: 15062 - RNA, 25 nt, Artificial Sequence
  Synthetic Oligonucleotide
cuuaccagaaacggaugggagugca

SEQ ID NO: 15063 - RNA, 25 nt, Artificial Sequence
  Synthetic Oligonucleotide
acuacagcuaaggcuauggagcaga

SEQ ID NO: 15064 - RNA, 25 nt, Artificial Sequence
  Synthetic Oligonucleotide
acuacagcuaaggcuauggagcaca

SEQ ID NO: 15065 - RNA, 25 nt, Artificial Sequence
  Synthetic Oligonucleotide
acuacagcuaaggcuauggaacaaa

SEQ ID NO: 15066 - RNA, 25 nt, Artificial Sequence
  Synthetic Oligonucleotide
acuacagcuaaggcuauggaacaga

SEQ ID NO: 15067 - RNA, 25 nt, Artificial Sequence
  Synthetic Oligonucleotide
acuacggcuaaggcuauggagcaaa

SEQ ID NO: 15068 - RNA, 25 nt, Artificial Sequence
  Synthetic Oligonucleotide
acuacggcuaaggcuauggagcaga

SEQ ID NO: 15069 - RNA, 25 nt, Artificial Sequence
  Synthetic Oligonucleotide
acuacagcuaaggccauggagcaaa

SEQ ID NO: 15070 - RNA, 25 nt, Artificial Sequence
  Synthetic Oligonucleotide
acuacagcuaaagcuauggagcaaa

SEQ ID NO: 15071 - RNA, 25 nt, Artificial Sequence
  Synthetic Oligonucleotide
acuacagccaaggcuauggagcaaa

SEQ ID NO: 15072 - RNA, 25 nt, Artificial Sequence
  Synthetic Oligonucleotide
acuaccgcuaaggcuauggagcaaa

SEQ ID NO: 15073 - RNA, 25 nt, Artificial Sequence
  Synthetic Oligonucleotide
acaacagcuaaggcuauggagcaaa

SEQ ID NO: 15074 - RNA, 25 nt, Artificial Sequence
  Synthetic Oligonucleotide
accacagcuaaggcuauggagcaaa

SEQ ID NO: 15075 - RNA, 25 nt, Artificial Sequence
  Synthetic Oligonucleotide
aauacagcuaaggcuauggagcaaa

SEQ ID NO: 15076 - RNA, 25 nt, Artificial Sequence
  Synthetic Oligonucleotide
acuacagcuaaagcuauggagcaga

SEQ ID NO: 15077 - RNA, 25 nt, Artificial Sequence
  Synthetic Oligonucleotide
acuacagcgaaggcuauggagcaga

SEQ ID NO: 15078 - RNA, 25 nt, Artificial Sequence
  Synthetic Oligonucleotide
acuacagccaaggcuauggaacaaa

SEQ ID NO: 15079 - RNA, 25 nt, Artificial Sequence
  Synthetic Oligonucleotide
acuacagcuaaggccauggaacaga

SEQ ID NO: 15080 - RNA, 25 nt, Artificial Sequence
  Synthetic Oligonucleotide
accacagcuaaggcuauggaacaga

SEQ ID NO: 15081 - RNA, 25 nt, Artificial Sequence
  Synthetic Oligonucleotide
acuacggcuaaggccauggagcaaa

SEQ ID NO: 15082 - RNA, 25 nt, Artificial Sequence
  Synthetic Oligonucleotide
auuacagcuaaagcuauggagcaaa

SEQ ID NO: 15083 - RNA, 25 nt, Artificial Sequence
  Synthetic Oligonucleotide
acuacggcuaaggccauggagcaga

SEQ ID NO: 15084 - RNA, 25 nt, Artificial Sequence
  Synthetic Oligonucleotide
acuacagcuaaagccauggagcaaa

SEQ ID NO: 15085 - RNA, 25 nt, Artificial Sequence
  Synthetic Oligonucleotide
acuacagcuaaagcgauggagcaaa

SEQ ID NO: 15086 - RNA, 25 nt, Artificial Sequence
  Synthetic Oligonucleotide
acuacagcuuaugcuauggagcaaa

SEQ ID NO: 15087 - RNA, 25 nt, Artificial Sequence
  Synthetic Oligonucleotide
acaacagcuaaggccauggaacaaa

SEQ ID NO: 15088 - RNA, 25 nt, Artificial Sequence
  Synthetic Oligonucleotide
accacggcuaaggccauggagcaga

SEQ ID NO: 15089 - RNA, 25 nt, Artificial Sequence
  Synthetic Oligonucleotide
acaacagcuaaagccauggaacaaa

SEQ ID NO: 15090 - RNA, 25 nt, Artificial Sequence
  Synthetic Oligonucleotide
cuacagcuaaggcuauggagcagau

SEQ ID NO: 15091 - RNA, 25 nt, Artificial Sequence
  Synthetic Oligonucleotide
cuacagcuaaggcuauggagcacau

SEQ ID NO: 15092 - RNA, 25 nt, Artificial Sequence
  Synthetic Oligonucleotide
cuacagcuaaggcuauggaacaaau

SEQ ID NO: 15093 - RNA, 25 nt, Artificial Sequence
  Synthetic Oligonucleotide
cuacagcuaaggcuauggaacagau

SEQ ID NO: 15094 - RNA, 25 nt, Artificial Sequence
  Synthetic Oligonucleotide
cuacggcuaaggcuauggagcaaau

SEQ ID NO: 15095 - RNA, 25 nt, Artificial Sequence
  Synthetic Oligonucleotide
cuacggcuaaggcuauggagcagau

SEQ ID NO: 15096 - RNA, 25 nt, Artificial Sequence
  Synthetic Oligonucleotide
cuacagcuaaggccauggagcaaau

SEQ ID NO: 15097 - RNA, 25 nt, Artificial Sequence
  Synthetic Oligonucleotide
cuacagcuaaagcuauggagcaaau

SEQ ID NO: 15098 - RNA, 25 nt, Artificial Sequence
  Synthetic Oligonucleotide
cuacagccaaggcuauggagcaaau

SEQ ID NO: 15099 - RNA, 25 nt, Artificial Sequence
  Synthetic Oligonucleotide
cuaccgcuaaggcuauggagcaaau

SEQ ID NO: 15100 - RNA, 25 nt, Artificial Sequence
  Synthetic Oligonucleotide
caacagcuaaggcuauggagcaaau

SEQ ID NO: 15101 - RNA, 25 nt, Artificial Sequence
  Synthetic Oligonucleotide
ccacagcuaaggcuauggagcaaau

SEQ ID NO: 15102 - RNA, 25 nt, Artificial Sequence
  Synthetic Oligonucleotide
auacagcuaaggcuauggagcaaau

SEQ ID NO: 15103 - RNA, 25 nt, Artificial Sequence
  Synthetic Oligonucleotide
cuacagcuaaagcuauggagcagau

SEQ ID NO: 15104 - RNA, 25 nt, Artificial Sequence
  Synthetic Oligonucleotide
cuacagcgaaggcuauggagcagau

SEQ ID NO: 15105 - RNA, 25 nt, Artificial Sequence
  Synthetic Oligonucleotide
cuacagccaaggcuauggaacaaau

SEQ ID NO: 15106 - RNA, 25 nt, Artificial Sequence
  Synthetic Oligonucleotide
cuacagcuaaggccauggaacagau

SEQ ID NO: 15107 - RNA, 25 nt, Artificial Sequence
  Synthetic Oligonucleotide
ccacagcuaaggcuauggaacagau

SEQ ID NO: 15108 - RNA, 25 nt, Artificial Sequence
  Synthetic Oligonucleotide
cuacggcuaaggccauggagcaaau

SEQ ID NO: 15109 - RNA, 25 nt, Artificial Sequence
  Synthetic Oligonucleotide
uuacagcuaaagcuauggagcaaau

SEQ ID NO: 15110 - RNA, 25 nt, Artificial Sequence
  Synthetic Oligonucleotide
cuacggcuaaggccauggagcagau

SEQ ID NO: 15111 - RNA, 25 nt, Artificial Sequence
  Synthetic Oligonucleotide
cuacagcuaaagccauggagcaaau

SEQ ID NO: 15112 - RNA, 25 nt, Artificial Sequence
  Synthetic Oligonucleotide
cuacagcuaaagcgauggagcaaau

SEQ ID NO: 15113 - RNA, 25 nt, Artificial Sequence
  Synthetic Oligonucleotide
cuacagcuuaugcuauggagcaaau

SEQ ID NO: 15114 - RNA, 25 nt, Artificial Sequence
  Synthetic Oligonucleotide
caacagcuaaggccauggaacaaau

SEQ ID NO: 15115 - RNA, 25 nt, Artificial Sequence
  Synthetic Oligonucleotide
ccacggcuaaggccauggagcagau

SEQ ID NO: 15116 - RNA, 25 nt, Artificial Sequence
  Synthetic Oligonucleotide
caacagcuaaagccauggaacaaau

SEQ ID NO: 15117 - RNA, 25 nt, Artificial Sequence
  Synthetic Oligonucleotide
cacuacagcuaaggcuauggagcag

SEQ ID NO: 15118 - RNA, 25 nt, Artificial Sequence
  Synthetic Oligonucleotide
cacuacagcuaaggcuauggagcac

SEQ ID NO: 15119 - RNA, 25 nt, Artificial Sequence
  Synthetic Oligonucleotide
cacuacagcuaaggcuauggaacaa

SEQ ID NO: 15120 - RNA, 25 nt, Artificial Sequence
  Synthetic Oligonucleotide
cacuacagcuaaggcuauggaacag

SEQ ID NO: 15121 - RNA, 25 nt, Artificial Sequence
  Synthetic Oligonucleotide
cacuacggcuaaggcuauggagcaa

SEQ ID NO: 15122 - RNA, 25 nt, Artificial Sequence
  Synthetic Oligonucleotide
uacuacagcuaaggcuauggagcaa

SEQ ID NO: 15123 - RNA, 25 nt, Artificial Sequence
  Synthetic Oligonucleotide
cacuacggcuaaggcuauggagcag

SEQ ID NO: 15124 - RNA, 25 nt, Artificial Sequence
  Synthetic Oligonucleotide
cacuacagcuaaggccauggagcaa

SEQ ID NO: 15125 - RNA, 25 nt, Artificial Sequence
  Synthetic Oligonucleotide
cacuacagcuaaagcuauggagcaa

SEQ ID NO: 15126 - RNA, 25 nt, Artificial Sequence
  Synthetic Oligonucleotide
cacuacagccaaggcuauggagcaa

SEQ ID NO: 15127 - RNA, 25 nt, Artificial Sequence
  Synthetic Oligonucleotide
cacuaccgcuaaggcuauggagcaa

SEQ ID NO: 15128 - RNA, 25 nt, Artificial Sequence
  Synthetic Oligonucleotide
cacaacagcuaaggcuauggagcaa

SEQ ID NO: 15129 - RNA, 25 nt, Artificial Sequence
  Synthetic Oligonucleotide
caccacagcuaaggcuauggagcaa

SEQ ID NO: 15130 - RNA, 25 nt, Artificial Sequence
  Synthetic Oligonucleotide
caauacagcuaaggcuauggagcaa

SEQ ID NO: 15131 - RNA, 25 nt, Artificial Sequence
  Synthetic Oligonucleotide
cacuacagcuaaagcuauggagcag

SEQ ID NO: 15132 - RNA, 25 nt, Artificial Sequence
  Synthetic Oligonucleotide
cacuacagcgaaggcuauggagcag

SEQ ID NO: 15133 - RNA, 25 nt, Artificial Sequence
  Synthetic Oligonucleotide
cacuacagccaaggcuauggaacaa

SEQ ID NO: 15134 - RNA, 25 nt, Artificial Sequence
  Synthetic Oligonucleotide
cacuacagcuaaggccauggaacag

SEQ ID NO: 15135 - RNA, 25 nt, Artificial Sequence
  Synthetic Oligonucleotide
caccacagcuaaggcuauggaacag

SEQ ID NO: 15136 - RNA, 25 nt, Artificial Sequence
  Synthetic Oligonucleotide
uacuacggcuaaggcuauggagcaa

SEQ ID NO: 15137 - RNA, 25 nt, Artificial Sequence
  Synthetic Oligonucleotide
cacuacggcuaaggccauggagcaa

SEQ ID NO: 15138 - RNA, 25 nt, Artificial Sequence
  Synthetic Oligonucleotide
cauuacagcuaaagcuauggagcaa

SEQ ID NO: 15139 - RNA, 25 nt, Artificial Sequence
  Synthetic Oligonucleotide
cacuacggcuaaggccauggagcag

SEQ ID NO: 15140 - RNA, 25 nt, Artificial Sequence
  Synthetic Oligonucleotide
cacuacagcuaaagccauggagcaa

SEQ ID NO: 15141 - RNA, 25 nt, Artificial Sequence
  Synthetic Oligonucleotide
cacuacagcuaaagcgauggagcaa

SEQ ID NO: 15142 - RNA, 25 nt, Artificial Sequence
  Synthetic Oligonucleotide
cacuacagcuuaugcuauggagcaa

SEQ ID NO: 15143 - RNA, 25 nt, Artificial Sequence
  Synthetic Oligonucleotide
cacaacagcuaaggccauggaacaa

SEQ ID NO: 15144 - RNA, 25 nt, Artificial Sequence
  Synthetic Oligonucleotide
caccacggcuaaggccauggagcag

SEQ ID NO: 15145 - RNA, 25 nt, Artificial Sequence
  Synthetic Oligonucleotide
cacaacagcuaaagccauggaacaa

SEQ ID NO: 15146 - RNA, 25 nt, Artificial Sequence
  Synthetic Oligonucleotide
agcuaaggcuauggagcaaauggca

SEQ ID NO: 15147 - RNA, 25 nt, Artificial Sequence
  Synthetic Oligonucleotide
agcuaaggcuauggagcagauggcu

SEQ ID NO: 15148 - RNA, 25 nt, Artificial Sequence
  Synthetic Oligonucleotide
ggcuaaggcuauggagcaaauggcu

SEQ ID NO: 15149 - RNA, 25 nt, Artificial Sequence
  Synthetic Oligonucleotide
agcuaaggcuauggagcacauggcu

SEQ ID NO: 15150 - RNA, 25 nt, Artificial Sequence
  Synthetic Oligonucleotide
agcuaaggcuauggaacaaauggcu

SEQ ID NO: 15151 - RNA, 25 nt, Artificial Sequence
  Synthetic Oligonucleotide
agcuaaggccauggagcaaauggcu

SEQ ID NO: 15152 - RNA, 25 nt, Artificial Sequence
  Synthetic Oligonucleotide
agcuaaagcuauggagcaaauggcu

SEQ ID NO: 15153 - RNA, 25 nt, Artificial Sequence
  Synthetic Oligonucleotide
agccaaggcuauggagcaaauggcu

SEQ ID NO: 15154 - RNA, 25 nt, Artificial Sequence
  Synthetic Oligonucleotide
cgcuaaggcuauggagcaaauggcu

SEQ ID NO: 15155 - RNA, 25 nt, Artificial Sequence
  Synthetic Oligonucleotide
agcuaaggcuauggagcagauggca

SEQ ID NO: 15156 - RNA, 25 nt, Artificial Sequence
  Synthetic Oligonucleotide
agcuaaggcuauggagcagauggcg

SEQ ID NO: 15157 - RNA, 25 nt, Artificial Sequence
  Synthetic Oligonucleotide
agcuaaagcuauggagcaaauggca

SEQ ID NO: 15158 - RNA, 25 nt, Artificial Sequence
  Synthetic Oligonucleotide
ggcuaaggcuauggagcagauggcu

SEQ ID NO: 15159 - RNA, 25 nt, Artificial Sequence
  Synthetic Oligonucleotide
agcuaaggcuauggaacagauggcu

SEQ ID NO: 15160 - RNA, 25 nt, Artificial Sequence
  Synthetic Oligonucleotide
ggcuaaggccauggagcaaauggcu

SEQ ID NO: 15161 - RNA, 25 nt, Artificial Sequence
  Synthetic Oligonucleotide
agcuaaggcuauggaacagaugguu

SEQ ID NO: 15162 - RNA, 25 nt, Artificial Sequence
  Synthetic Oligonucleotide
ggcuaaggcuauggagcagauggcg

SEQ ID NO: 15163 - RNA, 25 nt, Artificial Sequence
  Synthetic Oligonucleotide
agcuaaggccauggaacaaauggcu

SEQ ID NO: 15164 - RNA, 25 nt, Artificial Sequence
  Synthetic Oligonucleotide
agcuaaagccauggagcaaauggcu

SEQ ID NO: 15165 - RNA, 25 nt, Artificial Sequence
  Synthetic Oligonucleotide
agcuaaagcgauggagcaaauggcu

SEQ ID NO: 15166 - RNA, 25 nt, Artificial Sequence
  Synthetic Oligonucleotide
agcuuaugcuauggagcaaauggcu

SEQ ID NO: 15167 - RNA, 25 nt, Artificial Sequence
  Synthetic Oligonucleotide
agccaaggcuauggaacaaauggcu

SEQ ID NO: 15168 - RNA, 25 nt, Artificial Sequence
  Synthetic Oligonucleotide
agcuaaagcuauggagcagauggcg

SEQ ID NO: 15169 - RNA, 25 nt, Artificial Sequence
  Synthetic Oligonucleotide
agcgaaggcuauggagcagauggcg

SEQ ID NO: 15170 - RNA, 25 nt, Artificial Sequence
  Synthetic Oligonucleotide
ggcuaaggccauggagcagauggcu

SEQ ID NO: 15171 - RNA, 25 nt, Artificial Sequence
  Synthetic Oligonucleotide
ggcuaaggccauggagcagauggca

SEQ ID NO: 15172 - RNA, 25 nt, Artificial Sequence
  Synthetic Oligonucleotide
agcuaaagccauggaacaaauggcu

SEQ ID NO: 15173 - RNA, 25 nt, Artificial Sequence
  Synthetic Oligonucleotide
agcuaaggccauggaacagauggcc

SEQ ID NO: 15174 - RNA, 25 nt, Artificial Sequence
  Synthetic Oligonucleotide
ggcuaaagccauggagcaaauggca

SEQ ID NO: 15175 - RNA, 25 nt, Artificial Sequence
  Synthetic Oligonucleotide
aacagcagaaugcuguggauguuga

SEQ ID NO: 15176 - RNA, 25 nt, Artificial Sequence
  Synthetic Oligonucleotide
aacagcagaaugcuguggaugcuua

SEQ ID NO: 15177 - RNA, 25 nt, Artificial Sequence
  Synthetic Oligonucleotide
aacagcagaaugcuguggaugcgga

SEQ ID NO: 15178 - RNA, 25 nt, Artificial Sequence
  Synthetic Oligonucleotide
aacagcagaaugcuguggaugauga

SEQ ID NO: 15179 - RNA, 25 nt, Artificial Sequence
  Synthetic Oligonucleotide
aacagcagaaugcuguggauacuga

SEQ ID NO: 15180 - RNA, 25 nt, Artificial Sequence
  Synthetic Oligonucleotide
aacagcagaaugcuguggaagcuga

SEQ ID NO: 15181 - RNA, 25 nt, Artificial Sequence
  Synthetic Oligonucleotide
aacagcagaaugcuguggaggcuga

SEQ ID NO: 15182 - RNA, 25 nt, Artificial Sequence
  Synthetic Oligonucleotide
aacagcagaaugcuguggacacuga

SEQ ID NO: 15183 - RNA, 25 nt, Artificial Sequence
  Synthetic Oligonucleotide
aacagcagagugcuguggaugcuga

SEQ ID NO: 15184 - RNA, 25 nt, Artificial Sequence
  Synthetic Oligonucleotide
aacagcaggaugcuguggaugcuga

SEQ ID NO: 15185 - RNA, 25 nt, Artificial Sequence
  Synthetic Oligonucleotide
agcagcagaaugcuguggaugcuga

SEQ ID NO: 15186 - RNA, 25 nt, Artificial Sequence
  Synthetic Oligonucleotide
aacagcagagugcuguggauguuga

SEQ ID NO: 15187 - RNA, 25 nt, Artificial Sequence
  Synthetic Oligonucleotide
aacagcagaaugcugugaaugcuga

SEQ ID NO: 15188 - RNA, 25 nt, Artificial Sequence
  Synthetic Oligonucleotide
aacagcagaaugcuguagaugcuga

SEQ ID NO: 15189 - RNA, 25 nt, Artificial Sequence
  Synthetic Oligonucleotide
aacagcagaaugcugcggaugcuga

SEQ ID NO: 15190 - RNA, 25 nt, Artificial Sequence
  Synthetic Oligonucleotide
aacagcagaaugcuggggaugcuga

SEQ ID NO: 15191 - RNA, 25 nt, Artificial Sequence
  Synthetic Oligonucleotide
aacagcagaaugcuauggaugcuga

SEQ ID NO: 15192 - RNA, 25 nt, Artificial Sequence
  Synthetic Oligonucleotide
aacagcagaaugcuuuggaugcuga

SEQ ID NO: 15193 - RNA, 25 nt, Artificial Sequence
  Synthetic Oligonucleotide
aacagcagaaagcuguggaugcuga

SEQ ID NO: 15194 - RNA, 25 nt, Artificial Sequence
  Synthetic Oligonucleotide
aacagcagaacgcuguggaugcuga

SEQ ID NO: 15195 - RNA, 25 nt, Artificial Sequence
  Synthetic Oligonucleotide
aacagcaaaaugcuguggaugcuga

SEQ ID NO: 15196 - RNA, 25 nt, Artificial Sequence
  Synthetic Oligonucleotide
aacagcauaaugcuguggaugcuga

SEQ ID NO: 15197 - RNA, 25 nt, Artificial Sequence
  Synthetic Oligonucleotide
awcagcagaaugcuguggaugcuga

SEQ ID NO: 15198 - RNA, 25 nt, Artificial Sequence
  Synthetic Oligonucleotide
aacagcagagugcuguggauacuga

SEQ ID NO: 15199 - RNA, 25 nt, Artificial Sequence
  Synthetic Oligonucleotide
agcagcagagugcuguggauguuga

SEQ ID NO: 15200 - RNA, 25 nt, Artificial Sequence
  Synthetic Oligonucleotide
aacagcagagugcuguagaugcuga

SEQ ID NO: 15201 - RNA, 25 nt, Artificial Sequence
  Synthetic Oligonucleotide
aacagcaaagugcuguggaugcuga

SEQ ID NO: 15202 - RNA, 25 nt, Artificial Sequence
  Synthetic Oligonucleotide
gacagcaaaaugcuguggaugcuga

SEQ ID NO: 15203 - RNA, 25 nt, Artificial Sequence
  Synthetic Oligonucleotide
aacagcagaguuauguggaugcuga

SEQ ID NO: 15204 - RNA, 25 nt, Artificial Sequence
  Synthetic Oligonucleotide
gaacagcagaaugcuguggauguug

SEQ ID NO: 15205 - RNA, 25 nt, Artificial Sequence
  Synthetic Oligonucleotide
gaacagcagaaugcuguggaugcuu

SEQ ID NO: 15206 - RNA, 25 nt, Artificial Sequence
  Synthetic Oligonucleotide
gaacagcagaaugcuguggaugcgg

SEQ ID NO: 15207 - RNA, 25 nt, Artificial Sequence
  Synthetic Oligonucleotide
gaacagcagaaugcuguggaugaug

SEQ ID NO: 15208 - RNA, 25 nt, Artificial Sequence
  Synthetic Oligonucleotide
gaacagcagaaugcuguggauacug

SEQ ID NO: 15209 - RNA, 25 nt, Artificial Sequence
  Synthetic Oligonucleotide
gaacagcagaaugcuguggaagcug

SEQ ID NO: 15210 - RNA, 25 nt, Artificial Sequence
  Synthetic Oligonucleotide
gaacagcagaaugcuguggaggcug

SEQ ID NO: 15211 - RNA, 25 nt, Artificial Sequence
  Synthetic Oligonucleotide
gaacagcagaaugcuguggacacug

SEQ ID NO: 15212 - RNA, 25 nt, Artificial Sequence
  Synthetic Oligonucleotide
gaacagcagagugcuguggaugcug

SEQ ID NO: 15213 - RNA, 25 nt, Artificial Sequence
  Synthetic Oligonucleotide
gaacagcaggaugcuguggaugcug

SEQ ID NO: 15214 - RNA, 25 nt, Artificial Sequence
  Synthetic Oligonucleotide
gagcagcagaaugcuguggaugcug

SEQ ID NO: 15215 - RNA, 25 nt, Artificial Sequence
  Synthetic Oligonucleotide
gaacagcagagugcuguggauguug

SEQ ID NO: 15216 - RNA, 25 nt, Artificial Sequence
  Synthetic Oligonucleotide
gaacagcagaaugcugugaaugcug

SEQ ID NO: 15217 - RNA, 25 nt, Artificial Sequence
  Synthetic Oligonucleotide
gaacagcagaaugcuguagaugcug

SEQ ID NO: 15218 - RNA, 25 nt, Artificial Sequence
  Synthetic Oligonucleotide
gaacagcagaaugcugcggaugcug

SEQ ID NO: 15219 - RNA, 25 nt, Artificial Sequence
  Synthetic Oligonucleotide
gaacagcagaaugcuggggaugcug

SEQ ID NO: 15220 - RNA, 25 nt, Artificial Sequence
  Synthetic Oligonucleotide
gaacagcagaaugcuauggaugcug

SEQ ID NO: 15221 - RNA, 25 nt, Artificial Sequence
  Synthetic Oligonucleotide
gaacagcagaaugcuuuggaugcug

SEQ ID NO: 15222 - RNA, 25 nt, Artificial Sequence
  Synthetic Oligonucleotide
gaacagcagaaagcuguggaugcug

SEQ ID NO: 15223 - RNA, 25 nt, Artificial Sequence
  Synthetic Oligonucleotide
gaacagcagaacgcuguggaugcug

SEQ ID NO: 15224 - RNA, 25 nt, Artificial Sequence
  Synthetic Oligonucleotide
gaacagcaaaaugcuguggaugcug

SEQ ID NO: 15225 - RNA, 25 nt, Artificial Sequence
  Synthetic Oligonucleotide
gaacagcauaaugcuguggaugcug

SEQ ID NO: 15226 - RNA, 25 nt, Artificial Sequence
  Synthetic Oligonucleotide
gawcagcagaaugcuguggaugcug

SEQ ID NO: 15227 - RNA, 25 nt, Artificial Sequence
  Synthetic Oligonucleotide
gaacagcagagugcuguggauacug

SEQ ID NO: 15228 - RNA, 25 nt, Artificial Sequence
  Synthetic Oligonucleotide
gagcagcagagugcuguggauguug

SEQ ID NO: 15229 - RNA, 25 nt, Artificial Sequence
  Synthetic Oligonucleotide
gaacagcagagugcuguagaugcug

SEQ ID NO: 15230 - RNA, 25 nt, Artificial Sequence
  Synthetic Oligonucleotide
gaacagcaaagugcuguggaugcug

SEQ ID NO: 15231 - RNA, 25 nt, Artificial Sequence
  Synthetic Oligonucleotide
ggacagcaaaaugcuguggaugcug

SEQ ID NO: 15232 - RNA, 25 nt, Artificial Sequence
  Synthetic Oligonucleotide
aaacagcagagugcuguggauguug

SEQ ID NO: 15233 - RNA, 25 nt, Artificial Sequence
  Synthetic Oligonucleotide
gaacagcagaguuauguggaugcug

SEQ ID NO: 15234 - RNA, 25 nt, Artificial Sequence
  Synthetic Oligonucleotide
cuaucagaaacgaaugggggugcaa

SEQ ID NO: 15235 - RNA, 25 nt, Artificial Sequence
  Synthetic Oligonucleotide
cuaucagaaacgaaugggguugcag

SEQ ID NO: 15236 - RNA, 25 nt, Artificial Sequence
  Synthetic Oligonucleotide
cuaucagaaacggaugggggugcag

SEQ ID NO: 15237 - RNA, 25 nt, Artificial Sequence
  Synthetic Oligonucleotide
cuaucagaagcgaaugggggugcag

SEQ ID NO: 15238 - RNA, 25 nt, Artificial Sequence
  Synthetic Oligonucleotide
cuaucagagacgaaugggggugcag

SEQ ID NO: 15239 - RNA, 25 nt, Artificial Sequence
  Synthetic Oligonucleotide
cuaucagaaacgaaugggagugcag

SEQ ID NO: 15240 - RNA, 25 nt, Artificial Sequence
  Synthetic Oligonucleotide
cuaucagaaaagaaugggggugcag

SEQ ID NO: 15241 - RNA, 25 nt, Artificial Sequence
  Synthetic Oligonucleotide
cuaucaaaaacgaaugggggugcag

SEQ ID NO: 15242 - RNA, 25 nt, Artificial Sequence
  Synthetic Oligonucleotide
cuaccagaaacgaaugggggugcag

SEQ ID NO: 15243 - RNA, 25 nt, Artificial Sequence
  Synthetic Oligonucleotide
cuaucagaaacgaaugggagugcaa

SEQ ID NO: 15244 - RNA, 25 nt, Artificial Sequence
  Synthetic Oligonucleotide
cuaucagaaacgaaugggaguacag

SEQ ID NO: 15245 - RNA, 25 nt, Artificial Sequence
  Synthetic Oligonucleotide
cuaucagaaacgaaugggaguacaa

SEQ ID NO: 15246 - RNA, 25 nt, Artificial Sequence
  Synthetic Oligonucleotide
uuaucagaagcgaaugggggugcag

SEQ ID NO: 15247 - RNA, 25 nt, Artificial Sequence
  Synthetic Oligonucleotide
cuaucagaagcgaaugggagugcag

SEQ ID NO: 15248 - RNA, 25 nt, Artificial Sequence
  Synthetic Oligonucleotide
cuaucaaaaacgaaugggagugcag

SEQ ID NO: 15249 - RNA, 25 nt, Artificial Sequence
  Synthetic Oligonucleotide
cuaccagaaacgaaugggagugcag

SEQ ID NO: 15250 - RNA, 25 nt, Artificial Sequence
  Synthetic Oligonucleotide
cuaucagaaacggaugggagugcaa

SEQ ID NO: 15251 - RNA, 25 nt, Artificial Sequence
  Synthetic Oligonucleotide
cuaccagaaacgaaugggagugcaa

SEQ ID NO: 15252 - RNA, 25 nt, Artificial Sequence
  Synthetic Oligonucleotide
uuaccagaaacggaugggggugcag

SEQ ID NO: 15253 - RNA, 25 nt, Artificial Sequence
  Synthetic Oligonucleotide
cuaccagaaacggaugggagugcag

SEQ ID NO: 15254 - RNA, 25 nt, Artificial Sequence
  Synthetic Oligonucleotide
cuaccaaaaacgaaugggagugcag

SEQ ID NO: 15255 - RNA, 25 nt, Artificial Sequence
  Synthetic Oligonucleotide
auaccagaaacgaaugggagugcag

SEQ ID NO: 15256 - RNA, 25 nt, Artificial Sequence
  Synthetic Oligonucleotide
cuaucaaaagcgaaugggaguacag

SEQ ID NO: 15257 - RNA, 25 nt, Artificial Sequence
  Synthetic Oligonucleotide
cuaccagaaacggaugggagugcaa

SEQ ID NO: 15258 - RNA, 25 nt, Artificial Sequence
  Synthetic Oligonucleotide
ggaacagcagaaugcuguggauguu

SEQ ID NO: 15259 - RNA, 25 nt, Artificial Sequence
  Synthetic Oligonucleotide
ggaacagcagaaugcuguggaugcg

SEQ ID NO: 15260 - RNA, 25 nt, Artificial Sequence
  Synthetic Oligonucleotide
ggaacagcagaaugcuguggaugau

SEQ ID NO: 15261 - RNA, 25 nt, Artificial Sequence
  Synthetic Oligonucleotide
ggaacagcagaaugcuguggauacu

SEQ ID NO: 15262 - RNA, 25 nt, Artificial Sequence
  Synthetic Oligonucleotide
ggaacagcagaaugcuguggaagcu

SEQ ID NO: 15263 - RNA, 25 nt, Artificial Sequence
  Synthetic Oligonucleotide
ggaacagcagaaugcuguggaggcu

SEQ ID NO: 15264 - RNA, 25 nt, Artificial Sequence
  Synthetic Oligonucleotide
ggaacagcagaaugcugugaaugcu

SEQ ID NO: 15265 - RNA, 25 nt, Artificial Sequence
  Synthetic Oligonucleotide
ggaacagcagaaugcuguggacacu

SEQ ID NO: 15266 - RNA, 25 nt, Artificial Sequence
  Synthetic Oligonucleotide
ggaacagcagagugcuguggaugcu

SEQ ID NO: 15267 - RNA, 25 nt, Artificial Sequence
  Synthetic Oligonucleotide
ggaacagcaggaugcuguggaugcu

SEQ ID NO: 15268 - RNA, 25 nt, Artificial Sequence
  Synthetic Oligonucleotide
ggagcagcagaaugcuguggaugcu

SEQ ID NO: 15269 - RNA, 25 nt, Artificial Sequence
  Synthetic Oligonucleotide
ggaacagcagagugcuguggauguu

SEQ ID NO: 15270 - RNA, 25 nt, Artificial Sequence
  Synthetic Oligonucleotide
ggaacagcagaaugcuguagaugcu

SEQ ID NO: 15271 - RNA, 25 nt, Artificial Sequence
  Synthetic Oligonucleotide
ggaacagcagaaugcugcggaugcu

SEQ ID NO: 15272 - RNA, 25 nt, Artificial Sequence
  Synthetic Oligonucleotide
ggaacagcagaaugcuggggaugcu

SEQ ID NO: 15273 - RNA, 25 nt, Artificial Sequence
  Synthetic Oligonucleotide
ggaacagcagaaugcuauggaugcu

SEQ ID NO: 15274 - RNA, 25 nt, Artificial Sequence
  Synthetic Oligonucleotide
ggaacagcagaaugcuuuggaugcu

SEQ ID NO: 15275 - RNA, 25 nt, Artificial Sequence
  Synthetic Oligonucleotide
ggaacagcagaaagcuguggaugcu

SEQ ID NO: 15276 - RNA, 25 nt, Artificial Sequence
  Synthetic Oligonucleotide
ggaacagcagaacgcuguggaugcu

SEQ ID NO: 15277 - RNA, 25 nt, Artificial Sequence
  Synthetic Oligonucleotide
ggaacagcaaaaugcuguggaugcu

SEQ ID NO: 15278 - RNA, 25 nt, Artificial Sequence
  Synthetic Oligonucleotide
ggaacagcauaaugcuguggaugcu

SEQ ID NO: 15279 - RNA, 25 nt, Artificial Sequence
  Synthetic Oligonucleotide
ggawcagcagaaugcuguggaugcu

SEQ ID NO: 15280 - RNA, 25 nt, Artificial Sequence
  Synthetic Oligonucleotide
agaacagcagaaugcuguggaugcu

SEQ ID NO: 15281 - RNA, 25 nt, Artificial Sequence
  Synthetic Oligonucleotide
ugaacagcagaaugcuguggaugcu

SEQ ID NO: 15282 - RNA, 25 nt, Artificial Sequence
  Synthetic Oligonucleotide
ggaacagcagagugcuguggauacu

SEQ ID NO: 15283 - RNA, 25 nt, Artificial Sequence
  Synthetic Oligonucleotide
ugaacagcagaaugcuguggauguu

SEQ ID NO: 15284 - RNA, 25 nt, Artificial Sequence
  Synthetic Oligonucleotide
ggagcagcagagugcuguggauguu

SEQ ID NO: 15285 - RNA, 25 nt, Artificial Sequence
  Synthetic Oligonucleotide
ggaacagcagagugcuguagaugcu

SEQ ID NO: 15286 - RNA, 25 nt, Artificial Sequence
  Synthetic Oligonucleotide
ggaacagcaaagugcuguggaugcu

SEQ ID NO: 15287 - RNA, 25 nt, Artificial Sequence
  Synthetic Oligonucleotide
gggacagcaaaaugcuguggaugcu

SEQ ID NO: 15288 - RNA, 25 nt, Artificial Sequence
  Synthetic Oligonucleotide
ugaacagcagagugcuguggaugcu

SEQ ID NO: 15289 - RNA, 25 nt, Artificial Sequence
  Synthetic Oligonucleotide
gaaacagcagagugcuguggauguu

SEQ ID NO: 15290 - RNA, 25 nt, Artificial Sequence
  Synthetic Oligonucleotide
ggaacagcagaguuauguggaugcu

SEQ ID NO: 15291 - RNA, 25 nt, Artificial Sequence
  Synthetic Oligonucleotide
aucagaaacgaaugggggugcaggu

SEQ ID NO: 15292 - RNA, 25 nt, Artificial Sequence
  Synthetic Oligonucleotide
aucagaaacgaaugggggugcaaau

SEQ ID NO: 15293 - RNA, 25 nt, Artificial Sequence
  Synthetic Oligonucleotide
aucagaaacggaugggggugcagau

SEQ ID NO: 15294 - RNA, 25 nt, Artificial Sequence
  Synthetic Oligonucleotide
aucagaagcgaaugggggugcagau

SEQ ID NO: 15295 - RNA, 25 nt, Artificial Sequence
  Synthetic Oligonucleotide
aucagagacgaaugggggugcagau

SEQ ID NO: 15296 - RNA, 25 nt, Artificial Sequence
  Synthetic Oligonucleotide
aucagaaacgaaugggguugcagau

SEQ ID NO: 15297 - RNA, 25 nt, Artificial Sequence
  Synthetic Oligonucleotide
aucagaaacgaaugggagugcagau

SEQ ID NO: 15298 - RNA, 25 nt, Artificial Sequence
  Synthetic Oligonucleotide
aucagaaaagaaugggggugcagau

SEQ ID NO: 15299 - RNA, 25 nt, Artificial Sequence
  Synthetic Oligonucleotide
aucaaaaacgaaugggggugcagau

SEQ ID NO: 15300 - RNA, 25 nt, Artificial Sequence
  Synthetic Oligonucleotide
accagaaacgaaugggggugcagau

SEQ ID NO: 15301 - RNA, 25 nt, Artificial Sequence
  Synthetic Oligonucleotide
aucagaaacgaaugggagugcaaau

SEQ ID NO: 15302 - RNA, 25 nt, Artificial Sequence
  Synthetic Oligonucleotide
aucagaaacgaaugggaguacagau

SEQ ID NO: 15303 - RNA, 25 nt, Artificial Sequence
  Synthetic Oligonucleotide
aucagaaacgaaugggaguacaaau

SEQ ID NO: 15304 - RNA, 25 nt, Artificial Sequence
  Synthetic Oligonucleotide
aucagaagcgaaugggagugcagau

SEQ ID NO: 15305 - RNA, 25 nt, Artificial Sequence
  Synthetic Oligonucleotide
accagaaacggaugggggugcagau

SEQ ID NO: 15306 - RNA, 25 nt, Artificial Sequence
  Synthetic Oligonucleotide
aucaaaaacgaaugggagugcagau

SEQ ID NO: 15307 - RNA, 25 nt, Artificial Sequence
  Synthetic Oligonucleotide
accagaaacgaaugggagugcagau

SEQ ID NO: 15308 - RNA, 25 nt, Artificial Sequence
  Synthetic Oligonucleotide
aucagaaacggaugggagugcaaau

SEQ ID NO: 15309 - RNA, 25 nt, Artificial Sequence
  Synthetic Oligonucleotide
accagaaacgaaugggagugcaaau

SEQ ID NO: 15310 - RNA, 25 nt, Artificial Sequence
  Synthetic Oligonucleotide
accagaaacggaugggagugcagau

SEQ ID NO: 15311 - RNA, 25 nt, Artificial Sequence
  Synthetic Oligonucleotide
accaaaaacggaugggggugcagau

SEQ ID NO: 15312 - RNA, 25 nt, Artificial Sequence
  Synthetic Oligonucleotide
accaaaaacgaaugggagugcagau

SEQ ID NO: 15313 - RNA, 25 nt, Artificial Sequence
  Synthetic Oligonucleotide
aucaaaagcgaaugggaguacagau

SEQ ID NO: 15314 - RNA, 25 nt, Artificial Sequence
  Synthetic Oligonucleotide
accagaaacggaugggagugcaaau

SEQ ID NO: 15315 - RNA, 25 nt, Artificial Sequence
  Synthetic Oligonucleotide
uaucauugggaucuugcacuuggua

SEQ ID NO: 15316 - RNA, 25 nt, Artificial Sequence
  Synthetic Oligonucleotide
uaucauugggaucuugcacuugaca

SEQ ID NO: 15317 - RNA, 25 nt, Artificial Sequence
  Synthetic Oligonucleotide
uaucauugggaucuugcacuugawa

SEQ ID NO: 15318 - RNA, 25 nt, Artificial Sequence
  Synthetic Oligonucleotide
uaucauugggaucuugcacuuuaua

SEQ ID NO: 15319 - RNA, 25 nt, Artificial Sequence
  Synthetic Oligonucleotide
uaucauugggaucuugcaccugaua

SEQ ID NO: 15320 - RNA, 25 nt, Artificial Sequence
  Synthetic Oligonucleotide
uaucauugggauuuugcacuugaua

SEQ ID NO: 15321 - RNA, 25 nt, Artificial Sequence
  Synthetic Oligonucleotide
uaucguugggaucuugcacuugaua

SEQ ID NO: 15322 - RNA, 25 nt, Artificial Sequence
  Synthetic Oligonucleotide
uauuauugggaucuugcacuugaua

SEQ ID NO: 15323 - RNA, 25 nt, Artificial Sequence
  Synthetic Oligonucleotide
ugucauugggaucuugcacuugaua

SEQ ID NO: 15324 - RNA, 25 nt, Artificial Sequence
  Synthetic Oligonucleotide
uaucauugggaucuugcawuugaua

SEQ ID NO: 15325 - RNA, 25 nt, Artificial Sequence
  Synthetic Oligonucleotide
uaucauugggaucuuacacuugaua

SEQ ID NO: 15326 - RNA, 25 nt, Artificial Sequence
  Synthetic Oligonucleotide
uaucauugggauccugcacuugaua

SEQ ID NO: 15327 - RNA, 25 nt, Artificial Sequence
  Synthetic Oligonucleotide
uaucauugggauauugcacuugaua

SEQ ID NO: 15328 - RNA, 25 nt, Artificial Sequence
  Synthetic Oligonucleotide
uaucauuggaaucuugcacuugaua

SEQ ID NO: 15329 - RNA, 25 nt, Artificial Sequence
  Synthetic Oligonucleotide
uaucauuggcaucuugcacuugaua

SEQ ID NO: 15330 - RNA, 25 nt, Artificial Sequence
  Synthetic Oligonucleotide
uaucauugagaucuugcacuugaua

SEQ ID NO: 15331 - RNA, 25 nt, Artificial Sequence
  Synthetic Oligonucleotide
uaucaucgggaucuugcacuugaua

SEQ ID NO: 15332 - RNA, 25 nt, Artificial Sequence
  Synthetic Oligonucleotide
uuucauugggaucuugcacuugaua

SEQ ID NO: 15333 - RNA, 25 nt, Artificial Sequence
  Synthetic Oligonucleotide
caucauugggaucuugcacuugaua

SEQ ID NO: 15334 - RNA, 25 nt, Artificial Sequence
  Synthetic Oligonucleotide
uaucauugggaucaugcaccugaua

SEQ ID NO: 15335 - RNA, 25 nt, Artificial Sequence
  Synthetic Oligonucleotide
uaucauugggauauugcaccugaua

SEQ ID NO: 15336 - RNA, 25 nt, Artificial Sequence
  Synthetic Oligonucleotide
uguuauugggaucuugcacuugaua

SEQ ID NO: 15337 - RNA, 25 nt, Artificial Sequence
  Synthetic Oligonucleotide
uaucauugggauuaugcaccugaua

SEQ ID NO: 15338 - RNA, 25 nt, Artificial Sequence
  Synthetic Oligonucleotide
uaucauugggauugugcaccugaua

SEQ ID NO: 15339 - RNA, 25 nt, Artificial Sequence
  Synthetic Oligonucleotide
caucauugggauuuugcaccugaua

SEQ ID NO: 15340 - RNA, 25 nt, Artificial Sequence
  Synthetic Oligonucleotide
ugucguugggauauugcacuugaua

SEQ ID NO: 15341 - RNA, 25 nt, Artificial Sequence
  Synthetic Oligonucleotide
uauaauugggauugugcacuugaua

SEQ ID NO: 15342 - RNA, 25 nt, Artificial Sequence
  Synthetic Oligonucleotide
uaucguugggauugugcaccugaua

SEQ ID NO: 15343 - RNA, 25 nt, Artificial Sequence
  Synthetic Oligonucleotide
uauaauugggauugugcaccugaua

SEQ ID NO: 15344 - RNA, 25 nt, Artificial Sequence
  Synthetic Oligonucleotide
uaucagaaacgaaugggggugcagg

SEQ ID NO: 15345 - RNA, 25 nt, Artificial Sequence
  Synthetic Oligonucleotide
uaucagaaacgaaugggggugcaaa

SEQ ID NO: 15346 - RNA, 25 nt, Artificial Sequence
  Synthetic Oligonucleotide
uaucagaaacggaugggggugcaga

SEQ ID NO: 15347 - RNA, 25 nt, Artificial Sequence
  Synthetic Oligonucleotide
uaucagaagcgaaugggggugcaga

SEQ ID NO: 15348 - RNA, 25 nt, Artificial Sequence
  Synthetic Oligonucleotide
uaucagagacgaaugggggugcaga

SEQ ID NO: 15349 - RNA, 25 nt, Artificial Sequence
  Synthetic Oligonucleotide
uaucagaaacgaaugggguugcaga

SEQ ID NO: 15350 - RNA, 25 nt, Artificial Sequence
  Synthetic Oligonucleotide
uaucagaaacgaaugggagugcaga

SEQ ID NO: 15351 - RNA, 25 nt, Artificial Sequence
  Synthetic Oligonucleotide
uaucagaaaagaaugggggugcaga

SEQ ID NO: 15352 - RNA, 25 nt, Artificial Sequence
  Synthetic Oligonucleotide
uaucaaaaacgaaugggggugcaga

SEQ ID NO: 15353 - RNA, 25 nt, Artificial Sequence
  Synthetic Oligonucleotide
uaccagaaacgaaugggggugcaga

SEQ ID NO: 15354 - RNA, 25 nt, Artificial Sequence
  Synthetic Oligonucleotide
uaucagaaacgaaugggagugcaaa

SEQ ID NO: 15355 - RNA, 25 nt, Artificial Sequence
  Synthetic Oligonucleotide
uaucagaaacgaaugggaguacaga

SEQ ID NO: 15356 - RNA, 25 nt, Artificial Sequence
  Synthetic Oligonucleotide
uaucagaaacgaaugggaguacaaa

SEQ ID NO: 15357 - RNA, 25 nt, Artificial Sequence
  Synthetic Oligonucleotide
uaucagaagcgaaugggagugcaga

SEQ ID NO: 15358 - RNA, 25 nt, Artificial Sequence
  Synthetic Oligonucleotide
uaccagaaacggaugggggugcaga

SEQ ID NO: 15359 - RNA, 25 nt, Artificial Sequence
  Synthetic Oligonucleotide
uaucaaaaacgaaugggagugcaga

SEQ ID NO: 15360 - RNA, 25 nt, Artificial Sequence
  Synthetic Oligonucleotide
uaccagaaacgaaugggagugcaga

SEQ ID NO: 15361 - RNA, 25 nt, Artificial Sequence
  Synthetic Oligonucleotide
uaucagaaacggaugggagugcaaa

SEQ ID NO: 15362 - RNA, 25 nt, Artificial Sequence
  Synthetic Oligonucleotide
uaccagaaacgaaugggagugcaaa

SEQ ID NO: 15363 - RNA, 25 nt, Artificial Sequence
  Synthetic Oligonucleotide
uaccagaaacggaugggagugcaga

SEQ ID NO: 15364 - RNA, 25 nt, Artificial Sequence
  Synthetic Oligonucleotide
uaccaaaaacggaugggggugcaga

SEQ ID NO: 15365 - RNA, 25 nt, Artificial Sequence
  Synthetic Oligonucleotide
uaccaaaaacgaaugggagugcaga

SEQ ID NO: 15366 - RNA, 25 nt, Artificial Sequence
  Synthetic Oligonucleotide
uaucaaaagcgaaugggaguacaga

SEQ ID NO: 15367 - RNA, 25 nt, Artificial Sequence
  Synthetic Oligonucleotide
uaccagaaacggaugggagugcaaa

SEQ ID NO: 15368 - RNA, 25 nt, Artificial Sequence
  Synthetic Oligonucleotide
ucagaaacgaaugggggugcaggug

SEQ ID NO: 15369 - RNA, 25 nt, Artificial Sequence
  Synthetic Oligonucleotide
ucagaaacgaaugggggugcagauu

SEQ ID NO: 15370 - RNA, 25 nt, Artificial Sequence
  Synthetic Oligonucleotide
ucagaaacgaaugggggugcaaaug

SEQ ID NO: 15371 - RNA, 25 nt, Artificial Sequence
  Synthetic Oligonucleotide
ucagaaacggaugggggugcagaug

SEQ ID NO: 15372 - RNA, 25 nt, Artificial Sequence
  Synthetic Oligonucleotide
ucagaagcgaaugggggugcagaug

SEQ ID NO: 15373 - RNA, 25 nt, Artificial Sequence
  Synthetic Oligonucleotide
ucagagacgaaugggggugcagaug

SEQ ID NO: 15374 - RNA, 25 nt, Artificial Sequence
  Synthetic Oligonucleotide
ucagaaacgaaugggguugcagaug

SEQ ID NO: 15375 - RNA, 25 nt, Artificial Sequence
  Synthetic Oligonucleotide
ucagaaacgaaugggagugcagaug

SEQ ID NO: 15376 - RNA, 25 nt, Artificial Sequence
  Synthetic Oligonucleotide
ucagaaaagaaugggggugcagaug

SEQ ID NO: 15377 - RNA, 25 nt, Artificial Sequence
  Synthetic Oligonucleotide
ucaaaaacgaaugggggugcagaug

SEQ ID NO: 15378 - RNA, 25 nt, Artificial Sequence
  Synthetic Oligonucleotide
ccagaaacgaaugggggugcagaug

SEQ ID NO: 15379 - RNA, 25 nt, Artificial Sequence
  Synthetic Oligonucleotide
ucagaaacgaaugggagugcaaaug

SEQ ID NO: 15380 - RNA, 25 nt, Artificial Sequence
  Synthetic Oligonucleotide
ccagaaacgaaugggggugcagaua

SEQ ID NO: 15381 - RNA, 25 nt, Artificial Sequence
  Synthetic Oligonucleotide
ucagaagcgaaugggagugcagaug

SEQ ID NO: 15382 - RNA, 25 nt, Artificial Sequence
  Synthetic Oligonucleotide
ccagaaacggaugggggugcagaug

SEQ ID NO: 15383 - RNA, 25 nt, Artificial Sequence
  Synthetic Oligonucleotide
ucagaaacgaaugggaguacagaug

SEQ ID NO: 15384 - RNA, 25 nt, Artificial Sequence
  Synthetic Oligonucleotide
ucaaaaacgaaugggagugcagaug

SEQ ID NO: 15385 - RNA, 25 nt, Artificial Sequence
  Synthetic Oligonucleotide
ccagaaacgaaugggagugcagaug

SEQ ID NO: 15386 - RNA, 25 nt, Artificial Sequence
  Synthetic Oligonucleotide
ucagaaacggaugggagugcaaaug

SEQ ID NO: 15387 - RNA, 25 nt, Artificial Sequence
  Synthetic Oligonucleotide
ucagaaacgaaugggaguacaaaug

SEQ ID NO: 15388 - RNA, 25 nt, Artificial Sequence
  Synthetic Oligonucleotide
ccagaaacgaaugggagugcaaaug

SEQ ID NO: 15389 - RNA, 25 nt, Artificial Sequence
  Synthetic Oligonucleotide
ccagaaacggaugggagugcagaug

SEQ ID NO: 15390 - RNA, 25 nt, Artificial Sequence
  Synthetic Oligonucleotide
ccaaaaacggaugggggugcagaug

SEQ ID NO: 15391 - RNA, 25 nt, Artificial Sequence
  Synthetic Oligonucleotide
ccaaaaacgaaugggagugcagaug

SEQ ID NO: 15392 - RNA, 25 nt, Artificial Sequence
  Synthetic Oligonucleotide
ccagaaacggaugggagugcagaua

SEQ ID NO: 15393 - RNA, 25 nt, Artificial Sequence
  Synthetic Oligonucleotide
ccagaaacggaugggagugcaaaug

SEQ ID NO: 15394 - RNA, 25 nt, Artificial Sequence
  Synthetic Oligonucleotide
uugaauggaaugauaacacaguuca

SEQ ID NO: 15395 - RNA, 25 nt, Artificial Sequence
  Synthetic Oligonucleotide
uugaauggaaugauaacacaguuag

SEQ ID NO: 15396 - RNA, 25 nt, Artificial Sequence
  Synthetic Oligonucleotide
uugaauggaaugauaacacagcucg

SEQ ID NO: 15397 - RNA, 25 nt, Artificial Sequence
  Synthetic Oligonucleotide
uugaauggaaugauaacacgguucg

SEQ ID NO: 15398 - RNA, 25 nt, Artificial Sequence
  Synthetic Oligonucleotide
uugaauggaaugauaawacaguucg

SEQ ID NO: 15399 - RNA, 25 nt, Artificial Sequence
  Synthetic Oligonucleotide
uugaauggaaugauaauacaguucg

SEQ ID NO: 15400 - RNA, 25 nt, Artificial Sequence
  Synthetic Oligonucleotide
uugaauggaaugacaacacaguucg

SEQ ID NO: 15401 - RNA, 25 nt, Artificial Sequence
  Synthetic Oligonucleotide
uugaauggaaugguaacacaguucg

SEQ ID NO: 15402 - RNA, 25 nt, Artificial Sequence
  Synthetic Oligonucleotide
uugaauggaaugguaacacgguucg

SEQ ID NO: 15403 - RNA, 25 nt, Artificial Sequence
  Synthetic Oligonucleotide
uugaauggaauaauaacacaguucg

SEQ ID NO: 15404 - RNA, 25 nt, Artificial Sequence
  Synthetic Oligonucleotide
uugaauggagugauaacacaguucg

SEQ ID NO: 15405 - RNA, 25 nt, Artificial Sequence
  Synthetic Oligonucleotide
uugaauggagugauaacacuguucg

SEQ ID NO: 15406 - RNA, 25 nt, Artificial Sequence
  Synthetic Oligonucleotide
uugaguggaaugauaacacaguucg

SEQ ID NO: 15407 - RNA, 25 nt, Artificial Sequence
  Synthetic Oligonucleotide
wugaauggaaugauaacacaguucg

SEQ ID NO: 15408 - RNA, 25 nt, Artificial Sequence
  Synthetic Oligonucleotide
uugaguggaaugguaacacgguucg

SEQ ID NO: 15409 - RNA, 25 nt, Artificial Sequence
  Synthetic Oligonucleotide
cuugaauggaaugauaacacaguua

SEQ ID NO: 15410 - RNA, 25 nt, Artificial Sequence
  Synthetic Oligonucleotide
cuugaauggaaugauaacacagcuc

SEQ ID NO: 15411 - RNA, 25 nt, Artificial Sequence
  Synthetic Oligonucleotide
cuugaauggaaugauaacacgguuc

SEQ ID NO: 15412 - RNA, 25 nt, Artificial Sequence
  Synthetic Oligonucleotide
cuugaauggaaugauaawacaguuc

SEQ ID NO: 15413 - RNA, 25 nt, Artificial Sequence
  Synthetic Oligonucleotide
cuugaauggaaugauaauacaguuc

SEQ ID NO: 15414 - RNA, 25 nt, Artificial Sequence
  Synthetic Oligonucleotide
cuugaauggaaugacaacacaguuc

SEQ ID NO: 15415 - RNA, 25 nt, Artificial Sequence
  Synthetic Oligonucleotide
cuugaauggaaugguaacacaguuc

SEQ ID NO: 15416 - RNA, 25 nt, Artificial Sequence
  Synthetic Oligonucleotide
cuugaauggaaugguaacacgguuc

SEQ ID NO: 15417 - RNA, 25 nt, Artificial Sequence
  Synthetic Oligonucleotide
cuugaauggaauaauaacacaguuc

SEQ ID NO: 15418 - RNA, 25 nt, Artificial Sequence
  Synthetic Oligonucleotide
cuugaauggagugauaacacaguuc

SEQ ID NO: 15419 - RNA, 25 nt, Artificial Sequence
  Synthetic Oligonucleotide
cuugaauggagugauaacacuguuc

SEQ ID NO: 15420 - RNA, 25 nt, Artificial Sequence
  Synthetic Oligonucleotide
cuugaguggaaugauaacacaguuc

SEQ ID NO: 15421 - RNA, 25 nt, Artificial Sequence
  Synthetic Oligonucleotide
auugaauggaaugauaacacaguuc

SEQ ID NO: 15422 - RNA, 25 nt, Artificial Sequence
  Synthetic Oligonucleotide
uuugaauggaaugauaacacaguuc

SEQ ID NO: 15423 - RNA, 25 nt, Artificial Sequence
  Synthetic Oligonucleotide
cuugaguggaaugguaacacgguuc

SEQ ID NO: 15424 - RNA, 25 nt, Artificial Sequence
  Synthetic Oligonucleotide
wwugaauggaaugauaacacaguuc

SEQ ID NO: 15425 - RNA, 25 nt, Artificial Sequence
  Synthetic Oligonucleotide
ugaauggaaugauaacacaguucgg

SEQ ID NO: 15426 - RNA, 25 nt, Artificial Sequence
  Synthetic Oligonucleotide
ugaauggaaugauaacacaguucaa

SEQ ID NO: 15427 - RNA, 25 nt, Artificial Sequence
  Synthetic Oligonucleotide
ugaauggaaugauaacacaguuaga

SEQ ID NO: 15428 - RNA, 25 nt, Artificial Sequence
  Synthetic Oligonucleotide
ugaauggaaugauaacacagcucga

SEQ ID NO: 15429 - RNA, 25 nt, Artificial Sequence
  Synthetic Oligonucleotide
ugaauggaaugauaacacgguucga

SEQ ID NO: 15430 - RNA, 25 nt, Artificial Sequence
  Synthetic Oligonucleotide
ugaauggaaugauaawacaguucga

SEQ ID NO: 15431 - RNA, 25 nt, Artificial Sequence
  Synthetic Oligonucleotide
ugaauggaaugauaauacaguucga

SEQ ID NO: 15432 - RNA, 25 nt, Artificial Sequence
  Synthetic Oligonucleotide
ugaauggaaugacaacacaguucga

SEQ ID NO: 15433 - RNA, 25 nt, Artificial Sequence
  Synthetic Oligonucleotide
ugaauggaaugguaacacaguucga

SEQ ID NO: 15434 - RNA, 25 nt, Artificial Sequence
  Synthetic Oligonucleotide
ugaauggaauaauaacacaguucga

SEQ ID NO: 15435 - RNA, 25 nt, Artificial Sequence
  Synthetic Oligonucleotide
ugaauggagugauaacacaguucga

SEQ ID NO: 15436 - RNA, 25 nt, Artificial Sequence
  Synthetic Oligonucleotide
ugaguggaaugauaacacaguucga

SEQ ID NO: 15437 - RNA, 25 nt, Artificial Sequence
  Synthetic Oligonucleotide
ugaauggaaugguaacacgguucga

SEQ ID NO: 15438 - RNA, 25 nt, Artificial Sequence
  Synthetic Oligonucleotide
ugaauggagugauaacacuguucga

SEQ ID NO: 15439 - RNA, 25 nt, Artificial Sequence
  Synthetic Oligonucleotide
ugaguggaaugguaacacgguucga

SEQ ID NO: 15440 - RNA, 25 nt, Artificial Sequence
  Synthetic Oligonucleotide
gaauggaaugauaacacaguucgaa

SEQ ID NO: 15441 - RNA, 25 nt, Artificial Sequence
  Synthetic Oligonucleotide
gaauggaaugauaacacaguucggg

SEQ ID NO: 15442 - RNA, 25 nt, Artificial Sequence
  Synthetic Oligonucleotide
gaauggaaugauaacacaguucaag

SEQ ID NO: 15443 - RNA, 25 nt, Artificial Sequence
  Synthetic Oligonucleotide
gaauggaaugauaacacaguuagag

SEQ ID NO: 15444 - RNA, 25 nt, Artificial Sequence
  Synthetic Oligonucleotide
gaauggaaugauaacacagcucgag

SEQ ID NO: 15445 - RNA, 25 nt, Artificial Sequence
  Synthetic Oligonucleotide
gaauggaaugauaacacgguucgag

SEQ ID NO: 15446 - RNA, 25 nt, Artificial Sequence
  Synthetic Oligonucleotide
gaauggaaugauaawacaguucgag

SEQ ID NO: 15447 - RNA, 25 nt, Artificial Sequence
  Synthetic Oligonucleotide
gaauggaaugauaauacaguucgag

SEQ ID NO: 15448 - RNA, 25 nt, Artificial Sequence
  Synthetic Oligonucleotide
gaauggaaugacaacacaguucgag

SEQ ID NO: 15449 - RNA, 25 nt, Artificial Sequence
  Synthetic Oligonucleotide
gaauggaaugguaacacaguucgag

SEQ ID NO: 15450 - RNA, 25 nt, Artificial Sequence
  Synthetic Oligonucleotide
gaauggaauaauaacacaguucgag

SEQ ID NO: 15451 - RNA, 25 nt, Artificial Sequence
  Synthetic Oligonucleotide
gaauggagugauaacacaguucgag

SEQ ID NO: 15452 - RNA, 25 nt, Artificial Sequence
  Synthetic Oligonucleotide
gaguggaaugauaacacaguucgag

SEQ ID NO: 15453 - RNA, 25 nt, Artificial Sequence
  Synthetic Oligonucleotide
gaauggaaugguaacacgguucgag

SEQ ID NO: 15454 - RNA, 25 nt, Artificial Sequence
  Synthetic Oligonucleotide
gaauggagugauaacacuguucgag

SEQ ID NO: 15455 - RNA, 25 nt, Artificial Sequence
  Synthetic Oligonucleotide
gaguggaaugguaacacgguucgag

SEQ ID NO: 15456 - RNA, 25 nt, Artificial Sequence
  Synthetic Oligonucleotide
aauggaaugauaacacaguucgaau

SEQ ID NO: 15457 - RNA, 25 nt, Artificial Sequence
  Synthetic Oligonucleotide
aauggaaugauaacacaguucgggu

SEQ ID NO: 15458 - RNA, 25 nt, Artificial Sequence
  Synthetic Oligonucleotide
aauggaaugauaacacaguucaagu

SEQ ID NO: 15459 - RNA, 25 nt, Artificial Sequence
  Synthetic Oligonucleotide
aauggaaugauaacacaguuagagu

SEQ ID NO: 15460 - RNA, 25 nt, Artificial Sequence
  Synthetic Oligonucleotide
aauggaaugauaacacagcucgagu

SEQ ID NO: 15461 - RNA, 25 nt, Artificial Sequence
  Synthetic Oligonucleotide
aauggaaugauaacacgguucgagu

SEQ ID NO: 15462 - RNA, 25 nt, Artificial Sequence
  Synthetic Oligonucleotide
aauggaaugauaawacaguucgagu

SEQ ID NO: 15463 - RNA, 25 nt, Artificial Sequence
  Synthetic Oligonucleotide
aauggaaugauaauacaguucgagu

SEQ ID NO: 15464 - RNA, 25 nt, Artificial Sequence
  Synthetic Oligonucleotide
aauggaaugacaacacaguucgagu

SEQ ID NO: 15465 - RNA, 25 nt, Artificial Sequence
  Synthetic Oligonucleotide
aauggaaugguaacacaguucgagu

SEQ ID NO: 15466 - RNA, 25 nt, Artificial Sequence
  Synthetic Oligonucleotide
aauggaauaauaacacaguucgagu

SEQ ID NO: 15467 - RNA, 25 nt, Artificial Sequence
  Synthetic Oligonucleotide
aauggagugauaacacaguucgagu

SEQ ID NO: 15468 - RNA, 25 nt, Artificial Sequence
  Synthetic Oligonucleotide
aguggaaugauaacacaguucgagu

SEQ ID NO: 15469 - RNA, 25 nt, Artificial Sequence
  Synthetic Oligonucleotide
aauggaaugguaacacgguucgagu

SEQ ID NO: 15470 - RNA, 25 nt, Artificial Sequence
  Synthetic Oligonucleotide
aauggaaugguaacacgguucgagg

SEQ ID NO: 15471 - RNA, 25 nt, Artificial Sequence
  Synthetic Oligonucleotide
aauggagugauaacacuguucgagu

SEQ ID NO: 15472 - RNA, 25 nt, Artificial Sequence
  Synthetic Oligonucleotide
aguggaaugguaacacgguucgagu

SEQ ID NO: 15473 - RNA, 25 nt, Artificial Sequence
  Synthetic Oligonucleotide
auggaaugauaacacaguucgagua

SEQ ID NO: 15474 - RNA, 25 nt, Artificial Sequence
  Synthetic Oligonucleotide
auggaaugauaacacaguucgaauc

SEQ ID NO: 15475 - RNA, 25 nt, Artificial Sequence
  Synthetic Oligonucleotide
auggaaugauaacacaguucggguc

SEQ ID NO: 15476 - RNA, 25 nt, Artificial Sequence
  Synthetic Oligonucleotide
auggaaugauaacacaguucaaguc

SEQ ID NO: 15477 - RNA, 25 nt, Artificial Sequence
  Synthetic Oligonucleotide
auggaaugauaacacaguuagaguc

SEQ ID NO: 15478 - RNA, 25 nt, Artificial Sequence
  Synthetic Oligonucleotide
auggaaugauaacacagcucgaguc

SEQ ID NO: 15479 - RNA, 25 nt, Artificial Sequence
  Synthetic Oligonucleotide
auggaaugauaacacgguucgaguc

SEQ ID NO: 15480 - RNA, 25 nt, Artificial Sequence
  Synthetic Oligonucleotide
auggaaugauaawacaguucgaguc

SEQ ID NO: 15481 - RNA, 25 nt, Artificial Sequence
  Synthetic Oligonucleotide
auggaaugauaauacaguucgaguc

SEQ ID NO: 15482 - RNA, 25 nt, Artificial Sequence
  Synthetic Oligonucleotide
auggaaugacaacacaguucgaguc

SEQ ID NO: 15483 - RNA, 25 nt, Artificial Sequence
  Synthetic Oligonucleotide
auggaaugguaacacaguucgaguc

SEQ ID NO: 15484 - RNA, 25 nt, Artificial Sequence
  Synthetic Oligonucleotide
auggaauaauaacacaguucgaguc

SEQ ID NO: 15485 - RNA, 25 nt, Artificial Sequence
  Synthetic Oligonucleotide
auggagugauaacacaguucgaguc

SEQ ID NO: 15486 - RNA, 25 nt, Artificial Sequence
  Synthetic Oligonucleotide
guggaaugauaacacaguucgaguc

SEQ ID NO: 15487 - RNA, 25 nt, Artificial Sequence
  Synthetic Oligonucleotide
auggaaugguaacacgguucgaguc

SEQ ID NO: 15488 - RNA, 25 nt, Artificial Sequence
  Synthetic Oligonucleotide
auggaaugguaacacgguucgaggc

SEQ ID NO: 15489 - RNA, 25 nt, Artificial Sequence
  Synthetic Oligonucleotide
auggagugauaacacuguucgaguc

SEQ ID NO: 15490 - RNA, 25 nt, Artificial Sequence
  Synthetic Oligonucleotide
guggaaugguaacacgguucgaguc

SEQ ID NO: 15491 - RNA, 25 nt, Artificial Sequence
  Synthetic Oligonucleotide
gaaugauaacacaguucgagucacu

SEQ ID NO: 15492 - RNA, 25 nt, Artificial Sequence
  Synthetic Oligonucleotide
gaaugauaacacaguucgaguaucu

SEQ ID NO: 15493 - RNA, 25 nt, Artificial Sequence
  Synthetic Oligonucleotide
gaaugauaacacaguucgaaucucu

SEQ ID NO: 15494 - RNA, 25 nt, Artificial Sequence
  Synthetic Oligonucleotide
gaaugauaacacaguucgggucucu

SEQ ID NO: 15495 - RNA, 25 nt, Artificial Sequence
  Synthetic Oligonucleotide
gaaugauaacacaguucaagucucu

SEQ ID NO: 15496 - RNA, 25 nt, Artificial Sequence
  Synthetic Oligonucleotide
gaaugauaacacaguucaagucacu

SEQ ID NO: 15497 - RNA, 25 nt, Artificial Sequence
  Synthetic Oligonucleotide
gaaugauaacacaguuagagucucu

SEQ ID NO: 15498 - RNA, 25 nt, Artificial Sequence
  Synthetic Oligonucleotide
gaaugauaacacagcucgagucucu

SEQ ID NO: 15499 - RNA, 25 nt, Artificial Sequence
  Synthetic Oligonucleotide
gaaugauaacacgguucgagucucu

SEQ ID NO: 15500 - RNA, 25 nt, Artificial Sequence
  Synthetic Oligonucleotide
gaaugauaawacaguucgagucucu

SEQ ID NO: 15501 - RNA, 25 nt, Artificial Sequence
  Synthetic Oligonucleotide
gaaugauaauacaguucgagucucu

SEQ ID NO: 15502 - RNA, 25 nt, Artificial Sequence
  Synthetic Oligonucleotide
gaaugacaacacaguucgagucucu

SEQ ID NO: 15503 - RNA, 25 nt, Artificial Sequence
  Synthetic Oligonucleotide
gaaugguaacacaguucgagucucu

SEQ ID NO: 15504 - RNA, 25 nt, Artificial Sequence
  Synthetic Oligonucleotide
gaauaauaacacaguucgagucucu

SEQ ID NO: 15505 - RNA, 25 nt, Artificial Sequence
  Synthetic Oligonucleotide
gagugauaacacaguucgagucucu

SEQ ID NO: 15506 - RNA, 25 nt, Artificial Sequence
  Synthetic Oligonucleotide
gaaugguaacacgguucgagucucu

SEQ ID NO: 15507 - RNA, 25 nt, Artificial Sequence
  Synthetic Oligonucleotide
gaaugguaacacgguucgaggcucu

SEQ ID NO: 15508 - RNA, 25 nt, Artificial Sequence
  Synthetic Oligonucleotide
gagugauaacacuguucgagucucu

SEQ ID NO: 15509 - RNA, 25 nt, Artificial Sequence
  Synthetic Oligonucleotide
uggaaugauaacacaguucgaguca

SEQ ID NO: 15510 - RNA, 25 nt, Artificial Sequence
  Synthetic Oligonucleotide
uggaaugauaacacaguucgaguau

SEQ ID NO: 15511 - RNA, 25 nt, Artificial Sequence
  Synthetic Oligonucleotide
uggaaugauaacacaguucgaaucu

SEQ ID NO: 15512 - RNA, 25 nt, Artificial Sequence
  Synthetic Oligonucleotide
uggaaugauaacacaguucgggucu

SEQ ID NO: 15513 - RNA, 25 nt, Artificial Sequence
  Synthetic Oligonucleotide
uggaaugauaacacaguucaagucu

SEQ ID NO: 15514 - RNA, 25 nt, Artificial Sequence
  Synthetic Oligonucleotide
uggaaugauaacacaguucaaguca

SEQ ID NO: 15515 - RNA, 25 nt, Artificial Sequence
  Synthetic Oligonucleotide
uggaaugauaacacaguuagagucu

SEQ ID NO: 15516 - RNA, 25 nt, Artificial Sequence
  Synthetic Oligonucleotide
uggaaugauaacacagcucgagucu

SEQ ID NO: 15517 - RNA, 25 nt, Artificial Sequence
  Synthetic Oligonucleotide
uggaaugauaacacgguucgagucu

SEQ ID NO: 15518 - RNA, 25 nt, Artificial Sequence
  Synthetic Oligonucleotide
uggaaugauaawacaguucgagucu

SEQ ID NO: 15519 - RNA, 25 nt, Artificial Sequence
  Synthetic Oligonucleotide
uggaaugauaauacaguucgagucu

SEQ ID NO: 15520 - RNA, 25 nt, Artificial Sequence
  Synthetic Oligonucleotide
uggaaugacaacacaguucgagucu

SEQ ID NO: 15521 - RNA, 25 nt, Artificial Sequence
  Synthetic Oligonucleotide
uggaaugguaacacaguucgagucu

SEQ ID NO: 15522 - RNA, 25 nt, Artificial Sequence
  Synthetic Oligonucleotide
uggaauaauaacacaguucgagucu

SEQ ID NO: 15523 - RNA, 25 nt, Artificial Sequence
  Synthetic Oligonucleotide
uggagugauaacacaguucgagucu

SEQ ID NO: 15524 - RNA, 25 nt, Artificial Sequence
  Synthetic Oligonucleotide
uggaaugguaacacgguucgagucu

SEQ ID NO: 15525 - RNA, 25 nt, Artificial Sequence
  Synthetic Oligonucleotide
uggaaugguaacacgguucgaggcu

SEQ ID NO: 15526 - RNA, 25 nt, Artificial Sequence
  Synthetic Oligonucleotide
uggagugauaacacuguucgagucu

SEQ ID NO: 15527 - RNA, 25 nt, Artificial Sequence
  Synthetic Oligonucleotide
ggaaugauaacacaguucgagucac

SEQ ID NO: 15528 - RNA, 25 nt, Artificial Sequence
  Synthetic Oligonucleotide
ggaaugauaacacaguucgaguauc

SEQ ID NO: 15529 - RNA, 25 nt, Artificial Sequence
  Synthetic Oligonucleotide
ggaaugauaacacaguucgaaucuc

SEQ ID NO: 15530 - RNA, 25 nt, Artificial Sequence
  Synthetic Oligonucleotide
ggaaugauaacacaguucgggucuc

SEQ ID NO: 15531 - RNA, 25 nt, Artificial Sequence
  Synthetic Oligonucleotide
ggaaugauaacacaguucaagucuc

SEQ ID NO: 15532 - RNA, 25 nt, Artificial Sequence
  Synthetic Oligonucleotide
ggaaugauaacacaguucaagucac

SEQ ID NO: 15533 - RNA, 25 nt, Artificial Sequence
  Synthetic Oligonucleotide
ggaaugauaacacaguuagagucuc

SEQ ID NO: 15534 - RNA, 25 nt, Artificial Sequence
  Synthetic Oligonucleotide
ggaaugauaacacagcucgagucuc

SEQ ID NO: 15535 - RNA, 25 nt, Artificial Sequence
  Synthetic Oligonucleotide
ggaaugauaacacgguucgagucuc

SEQ ID NO: 15536 - RNA, 25 nt, Artificial Sequence
  Synthetic Oligonucleotide
ggaaugauaawacaguucgagucuc

SEQ ID NO: 15537 - RNA, 25 nt, Artificial Sequence
  Synthetic Oligonucleotide
ggaaugauaauacaguucgagucuc

SEQ ID NO: 15538 - RNA, 25 nt, Artificial Sequence
  Synthetic Oligonucleotide
ggaaugacaacacaguucgagucuc

SEQ ID NO: 15539 - RNA, 25 nt, Artificial Sequence
  Synthetic Oligonucleotide
ggaaugguaacacaguucgagucuc

SEQ ID NO: 15540 - RNA, 25 nt, Artificial Sequence
  Synthetic Oligonucleotide
ggaauaauaacacaguucgagucuc

SEQ ID NO: 15541 - RNA, 25 nt, Artificial Sequence
  Synthetic Oligonucleotide
ggagugauaacacaguucgagucuc

SEQ ID NO: 15542 - RNA, 25 nt, Artificial Sequence
  Synthetic Oligonucleotide
ggaaugguaacacgguucgagucuc

SEQ ID NO: 15543 - RNA, 25 nt, Artificial Sequence
  Synthetic Oligonucleotide
ggaaugguaacacgguucgaggcuc

SEQ ID NO: 15544 - RNA, 25 nt, Artificial Sequence
  Synthetic Oligonucleotide
ggagugauaacacuguucgagucuc

SEQ ID NO: 15545 - RNA, 25 nt, Artificial Sequence
  Synthetic Oligonucleotide
ugaggaugucaaaaaugcaauugga

SEQ ID NO: 15546 - RNA, 25 nt, Artificial Sequence
  Synthetic Oligonucleotide
ugaggaugucaaaaaugcaauuggc

SEQ ID NO: 15547 - RNA, 25 nt, Artificial Sequence
  Synthetic Oligonucleotide
ugaggaugucaaaaaugcaauuagg

SEQ ID NO: 15548 - RNA, 25 nt, Artificial Sequence
  Synthetic Oligonucleotide
ugaggaugucaaaaaugcaguuggg

SEQ ID NO: 15549 - RNA, 25 nt, Artificial Sequence
  Synthetic Oligonucleotide
ugaggaugucaaaaaugcaguugga

SEQ ID NO: 15550 - RNA, 25 nt, Artificial Sequence
  Synthetic Oligonucleotide
ugaggaugucaaaaaugcaguuggc

SEQ ID NO: 15551 - RNA, 25 nt, Artificial Sequence
  Synthetic Oligonucleotide
ugaggaugucaaaaaugcgauuggg

SEQ ID NO: 15552 - RNA, 25 nt, Artificial Sequence
  Synthetic Oligonucleotide
ugaggaugucaaaagugcaauuggc

SEQ ID NO: 15553 - RNA, 25 nt, Artificial Sequence
  Synthetic Oligonucleotide
ugaggaugucaaaauugcaauuggg

SEQ ID NO: 15554 - RNA, 25 nt, Artificial Sequence
  Synthetic Oligonucleotide
ugaggaugucaaagaugcaauuggg

SEQ ID NO: 15555 - RNA, 25 nt, Artificial Sequence
  Synthetic Oligonucleotide
ugaggauaucaaaaaugcaauuggc

SEQ ID NO: 15556 - RNA, 25 nt, Artificial Sequence
  Synthetic Oligonucleotide
ugagaaugucaaaaaugcaauuggg

SEQ ID NO: 15557 - RNA, 25 nt, Artificial Sequence
  Synthetic Oligonucleotide
uaaggaugucaaaaaugcaauuggg

SEQ ID NO: 15558 - RNA, 25 nt, Artificial Sequence
  Synthetic Oligonucleotide
agaggaugucaaaaaugcaauuggg

SEQ ID NO: 15559 - RNA, 25 nt, Artificial Sequence
  Synthetic Oligonucleotide
cgaggaugucaaaaaugcaauuggg

SEQ ID NO: 15560 - RNA, 25 nt, Artificial Sequence
  Synthetic Oligonucleotide
ugagaaugucaaagaugcaguuggg

SEQ ID NO: 15561 - RNA, 25 nt, Artificial Sequence
  Synthetic Oligonucleotide
cuugaucggcuucgccgagaucaaa

SEQ ID NO: 15562 - RNA, 25 nt, Artificial Sequence
  Synthetic Oligonucleotide
cuugaucggcuucgccgagauaaga

SEQ ID NO: 15563 - RNA, 25 nt, Artificial Sequence
  Synthetic Oligonucleotide
cuugaucggcuucgccgagaccaga

SEQ ID NO: 15564 - RNA, 25 nt, Artificial Sequence
  Synthetic Oligonucleotide
cuugaucggcuucgccgawaucaga

SEQ ID NO: 15565 - RNA, 25 nt, Artificial Sequence
  Synthetic Oligonucleotide
cuugaucggcuucgccgawwucaga

SEQ ID NO: 15566 - RNA, 25 nt, Artificial Sequence
  Synthetic Oligonucleotide
cuugaucggcuucgccgauaucaga

SEQ ID NO: 15567 - RNA, 25 nt, Artificial Sequence
  Synthetic Oligonucleotide
cuugaucggcuucgccgggaucaga

SEQ ID NO: 15568 - RNA, 25 nt, Artificial Sequence
  Synthetic Oligonucleotide
cuugaucggcuucgcagagaucaga

SEQ ID NO: 15569 - RNA, 25 nt, Artificial Sequence
  Synthetic Oligonucleotide
cuugaucggcuucgucgagaucaga

SEQ ID NO: 15570 - RNA, 25 nt, Artificial Sequence
  Synthetic Oligonucleotide
cuugaucggcuucaccgagaucaga

SEQ ID NO: 15571 - RNA, 25 nt, Artificial Sequence
  Synthetic Oligonucleotide
cuugaucggcuuagccgagaucaga

SEQ ID NO: 15572 - RNA, 25 nt, Artificial Sequence
  Synthetic Oligonucleotide
cuugaucggcuccgccgagaucaga

SEQ ID NO: 15573 - RNA, 25 nt, Artificial Sequence
  Synthetic Oligonucleotide
cuugaucggcuccgccgagaucaaa

SEQ ID NO: 15574 - RNA, 25 nt, Artificial Sequence
  Synthetic Oligonucleotide
cuugaucggcuccgccgagaucuca

SEQ ID NO: 15575 - RNA, 25 nt, Artificial Sequence
  Synthetic Oligonucleotide
cuugaucggauucgccgagaucaga

SEQ ID NO: 15576 - RNA, 25 nt, Artificial Sequence
  Synthetic Oligonucleotide
cuugaucgacuucgccgagaucaga

SEQ ID NO: 15577 - RNA, 25 nt, Artificial Sequence
  Synthetic Oligonucleotide
cuugauaggcuucgccgagaucaga

SEQ ID NO: 15578 - RNA, 25 nt, Artificial Sequence
  Synthetic Oligonucleotide
cuugaccggcuucgccgagaucaga

SEQ ID NO: 15579 - RNA, 25 nt, Artificial Sequence
  Synthetic Oligonucleotide
cuugaccggcuucgccgagaucaaa

SEQ ID NO: 15580 - RNA, 25 nt, Artificial Sequence
  Synthetic Oligonucleotide
cuugaccggcuucgccgagaccaaa

SEQ ID NO: 15581 - RNA, 25 nt, Artificial Sequence
  Synthetic Oligonucleotide
cucgaucggcuucgccgagaucaga

SEQ ID NO: 15582 - RNA, 25 nt, Artificial Sequence
  Synthetic Oligonucleotide
cucgaucggcuucgccgagaucaaa

SEQ ID NO: 15583 - RNA, 25 nt, Artificial Sequence
  Synthetic Oligonucleotide
auugaucggcuucgccgagaucaga

SEQ ID NO: 15584 - RNA, 25 nt, Artificial Sequence
  Synthetic Oligonucleotide
cuugaucgacuucgcagagaucaga

SEQ ID NO: 15585 - RNA, 25 nt, Artificial Sequence
  Synthetic Oligonucleotide
cuugauagacuucgccgagaucaga

SEQ ID NO: 15586 - RNA, 25 nt, Artificial Sequence
  Synthetic Oligonucleotide
cuugaccggcuucgucgagaucaga

SEQ ID NO: 15587 - RNA, 25 nt, Artificial Sequence
  Synthetic Oligonucleotide
auugaccggcuucgccgagaucaga

SEQ ID NO: 15588 - RNA, 25 nt, Artificial Sequence
  Synthetic Oligonucleotide
cuugaccggcuccgccgggaucaaa

SEQ ID NO: 15589 - RNA, 25 nt, Artificial Sequence
  Synthetic Oligonucleotide
cuugaccggguuugccgagaucaga

SEQ ID NO: 15590 - RNA, 25 nt, Artificial Sequence
  Synthetic Oligonucleotide
cuagaccggcuucgccgggaucaga

SEQ ID NO: 15591 - RNA, 25 nt, Artificial Sequence
  Synthetic Oligonucleotide
augucaaaaaugcaauugggguucu

SEQ ID NO: 15592 - RNA, 25 nt, Artificial Sequence
  Synthetic Oligonucleotide
augucaaaaaugcaauugggauccu

SEQ ID NO: 15593 - RNA, 25 nt, Artificial Sequence
  Synthetic Oligonucleotide
augucaaaaaugcaauugggauucu

SEQ ID NO: 15594 - RNA, 25 nt, Artificial Sequence
  Synthetic Oligonucleotide
augucaaaaaugcaauugggacccu

SEQ ID NO: 15595 - RNA, 25 nt, Artificial Sequence
  Synthetic Oligonucleotide
augucaaaaaugcaauugggcuccu

SEQ ID NO: 15596 - RNA, 25 nt, Artificial Sequence
  Synthetic Oligonucleotide
augucaaaaaugcaauuggaguccu

SEQ ID NO: 15597 - RNA, 25 nt, Artificial Sequence
  Synthetic Oligonucleotide
augucaaaaaugcaauuggauuccu

SEQ ID NO: 15598 - RNA, 25 nt, Artificial Sequence
  Synthetic Oligonucleotide
augucaaaaaugcaauuggcguccu

SEQ ID NO: 15599 - RNA, 25 nt, Artificial Sequence
  Synthetic Oligonucleotide
augucaaaaaugcaauuaggguccu

SEQ ID NO: 15600 - RNA, 25 nt, Artificial Sequence
  Synthetic Oligonucleotide
augucaaaaaugcaguugggguccu

SEQ ID NO: 15601 - RNA, 25 nt, Artificial Sequence
  Synthetic Oligonucleotide
augucaaaaaugcaguuggaguccu

SEQ ID NO: 15602 - RNA, 25 nt, Artificial Sequence
  Synthetic Oligonucleotide
augucaaaaaugcaguuggcguccu

SEQ ID NO: 15603 - RNA, 25 nt, Artificial Sequence
  Synthetic Oligonucleotide
augucaaaaaugcgauugggguccu

SEQ ID NO: 15604 - RNA, 25 nt, Artificial Sequence
  Synthetic Oligonucleotide
augucaaaagugcaauuggcguccu

SEQ ID NO: 15605 - RNA, 25 nt, Artificial Sequence
  Synthetic Oligonucleotide
augucaaaauugcaauugggguccu

SEQ ID NO: 15606 - RNA, 25 nt, Artificial Sequence
  Synthetic Oligonucleotide
augucaaagaugcaauugggguccu

SEQ ID NO: 15607 - RNA, 25 nt, Artificial Sequence
  Synthetic Oligonucleotide
auaucaaaaaugcaauuggcguccu

SEQ ID NO: 15608 - RNA, 25 nt, Artificial Sequence
  Synthetic Oligonucleotide
augucaaagaugcaguugggguccu

SEQ ID NO: 15609 - RNA, 25 nt, Artificial Sequence
  Synthetic Oligonucleotide
aggaugucaaaaaugcaauugggau

SEQ ID NO: 15610 - RNA, 25 nt, Artificial Sequence
  Synthetic Oligonucleotide
aggaugucaaaaaugcaauugggac

SEQ ID NO: 15611 - RNA, 25 nt, Artificial Sequence
  Synthetic Oligonucleotide
aggaugucaaaaaugcaauugggcu

SEQ ID NO: 15612 - RNA, 25 nt, Artificial Sequence
  Synthetic Oligonucleotide
aggaugucaaaaaugcaauuggagu

SEQ ID NO: 15613 - RNA, 25 nt, Artificial Sequence
  Synthetic Oligonucleotide
aggaugucaaaaaugcaauuggauu

SEQ ID NO: 15614 - RNA, 25 nt, Artificial Sequence
  Synthetic Oligonucleotide
aggaugucaaaaaugcaauuggcgu

SEQ ID NO: 15615 - RNA, 25 nt, Artificial Sequence
  Synthetic Oligonucleotide
aggaugucaaaaaugcaauuagggu

SEQ ID NO: 15616 - RNA, 25 nt, Artificial Sequence
  Synthetic Oligonucleotide
aggaugucaaaaaugcaguuggggu

SEQ ID NO: 15617 - RNA, 25 nt, Artificial Sequence
  Synthetic Oligonucleotide
aggaugucaaaaaugcaguuggagu

SEQ ID NO: 15618 - RNA, 25 nt, Artificial Sequence
  Synthetic Oligonucleotide
aggaugucaaaaaugcaguuggcgu

SEQ ID NO: 15619 - RNA, 25 nt, Artificial Sequence
  Synthetic Oligonucleotide
aggaugucaaaaaugcgauuggggu

SEQ ID NO: 15620 - RNA, 25 nt, Artificial Sequence
  Synthetic Oligonucleotide
aggaugucaaaagugcaauuggcgu

SEQ ID NO: 15621 - RNA, 25 nt, Artificial Sequence
  Synthetic Oligonucleotide
aggaugucaaaauugcaauuggggu

SEQ ID NO: 15622 - RNA, 25 nt, Artificial Sequence
  Synthetic Oligonucleotide
aggaugucaaagaugcaauuggggu

SEQ ID NO: 15623 - RNA, 25 nt, Artificial Sequence
  Synthetic Oligonucleotide
aggauaucaaaaaugcaauuggcgu

SEQ ID NO: 15624 - RNA, 25 nt, Artificial Sequence
  Synthetic Oligonucleotide
agaaugucaaaaaugcaauuggggu

SEQ ID NO: 15625 - RNA, 25 nt, Artificial Sequence
  Synthetic Oligonucleotide
agaaugucaaagaugcaguuggggu

SEQ ID NO: 15626 - RNA, 25 nt, Artificial Sequence
  Synthetic Oligonucleotide
ugucaaaaaugcaauugggguucuc

SEQ ID NO: 15627 - RNA, 25 nt, Artificial Sequence
  Synthetic Oligonucleotide
ugucaaaaaugcaauugggauccuc

SEQ ID NO: 15628 - RNA, 25 nt, Artificial Sequence
  Synthetic Oligonucleotide
ugucaaaaaugcaauugggauucuc

SEQ ID NO: 15629 - RNA, 25 nt, Artificial Sequence
  Synthetic Oligonucleotide
ugucaaaaaugcaauugggacccuc

SEQ ID NO: 15630 - RNA, 25 nt, Artificial Sequence
  Synthetic Oligonucleotide
ugucaaaaaugcaauugggcuccuc

SEQ ID NO: 15631 - RNA, 25 nt, Artificial Sequence
  Synthetic Oligonucleotide
ugucaaaaaugcaauuggaguccuc

SEQ ID NO: 15632 - RNA, 25 nt, Artificial Sequence
  Synthetic Oligonucleotide
ugucaaaaaugcaauuggauuccuc

SEQ ID NO: 15633 - RNA, 25 nt, Artificial Sequence
  Synthetic Oligonucleotide
ugucaaaaaugcaauuggcguccuc

SEQ ID NO: 15634 - RNA, 25 nt, Artificial Sequence
  Synthetic Oligonucleotide
ugucaaaaaugcaauuaggguccuc

SEQ ID NO: 15635 - RNA, 25 nt, Artificial Sequence
  Synthetic Oligonucleotide
ugucaaaaaugcaguugggguccuc

SEQ ID NO: 15636 - RNA, 25 nt, Artificial Sequence
  Synthetic Oligonucleotide
ugucaaaaaugcgauugggguccuc

SEQ ID NO: 15637 - RNA, 25 nt, Artificial Sequence
  Synthetic Oligonucleotide
ugucaaaauugcaauugggguccuc

SEQ ID NO: 15638 - RNA, 25 nt, Artificial Sequence
  Synthetic Oligonucleotide
ugucaaagaugcaauugggguccuc

SEQ ID NO: 15639 - RNA, 25 nt, Artificial Sequence
  Synthetic Oligonucleotide
ugucaaaaaugcaguuggaguccuc

SEQ ID NO: 15640 - RNA, 25 nt, Artificial Sequence
  Synthetic Oligonucleotide
ugucaaaaaugcaguuggcguccuc

SEQ ID NO: 15641 - RNA, 25 nt, Artificial Sequence
  Synthetic Oligonucleotide
ugucaaaagugcaauuggcguccuc

SEQ ID NO: 15642 - RNA, 25 nt, Artificial Sequence
  Synthetic Oligonucleotide
ugucaaagaugcaguugggguccuc

SEQ ID NO: 15643 - RNA, 25 nt, Artificial Sequence
  Synthetic Oligonucleotide
uaucaaaaaugcaauuggcguccuc

SEQ ID NO: 15644 - RNA, 25 nt, Artificial Sequence
  Synthetic Oligonucleotide
ggaugucaaaaaugcaauugggguu

SEQ ID NO: 15645 - RNA, 25 nt, Artificial Sequence
  Synthetic Oligonucleotide
ggaugucaaaaaugcaauugggauc

SEQ ID NO: 15646 - RNA, 25 nt, Artificial Sequence
  Synthetic Oligonucleotide
ggaugucaaaaaugcaauugggauu

SEQ ID NO: 15647 - RNA, 25 nt, Artificial Sequence
  Synthetic Oligonucleotide
ggaugucaaaaaugcaauugggacc

SEQ ID NO: 15648 - RNA, 25 nt, Artificial Sequence
  Synthetic Oligonucleotide
ggaugucaaaaaugcaauugggcuc

SEQ ID NO: 15649 - RNA, 25 nt, Artificial Sequence
  Synthetic Oligonucleotide
ggaugucaaaaaugcaauuggaguc

SEQ ID NO: 15650 - RNA, 25 nt, Artificial Sequence
  Synthetic Oligonucleotide
ggaugucaaaaaugcaauuggauuc

SEQ ID NO: 15651 - RNA, 25 nt, Artificial Sequence
  Synthetic Oligonucleotide
ggaugucaaaaaugcaauuggcguc

SEQ ID NO: 15652 - RNA, 25 nt, Artificial Sequence
  Synthetic Oligonucleotide
ggaugucaaaaaugcaauuaggguc

SEQ ID NO: 15653 - RNA, 25 nt, Artificial Sequence
  Synthetic Oligonucleotide
ggaugucaaaaaugcaguugggguc

SEQ ID NO: 15654 - RNA, 25 nt, Artificial Sequence
  Synthetic Oligonucleotide
ggaugucaaaaaugcaguuggaguc

SEQ ID NO: 15655 - RNA, 25 nt, Artificial Sequence
  Synthetic Oligonucleotide
ggaugucaaaaaugcaguuggcguc

SEQ ID NO: 15656 - RNA, 25 nt, Artificial Sequence
  Synthetic Oligonucleotide
ggaugucaaaaaugcgauugggguc

SEQ ID NO: 15657 - RNA, 25 nt, Artificial Sequence
  Synthetic Oligonucleotide
ggaugucaaaagugcaauuggcguc

SEQ ID NO: 15658 - RNA, 25 nt, Artificial Sequence
  Synthetic Oligonucleotide
ggaugucaaaauugcaauugggguc

SEQ ID NO: 15659 - RNA, 25 nt, Artificial Sequence
  Synthetic Oligonucleotide
ggaugucaaagaugcaauugggguc

SEQ ID NO: 15660 - RNA, 25 nt, Artificial Sequence
  Synthetic Oligonucleotide
ggauaucaaaaaugcaauuggcguc

SEQ ID NO: 15661 - RNA, 25 nt, Artificial Sequence
  Synthetic Oligonucleotide
gaaugucaaaaaugcaauugggguc

SEQ ID NO: 15662 - RNA, 25 nt, Artificial Sequence
  Synthetic Oligonucleotide
gaaugucaaagaugcaguugggguc

SEQ ID NO: 15663 - RNA, 25 nt, Artificial Sequence
  Synthetic Oligonucleotide
gaugucaaaaaugcaauugggguuc

SEQ ID NO: 15664 - RNA, 25 nt, Artificial Sequence
  Synthetic Oligonucleotide
gaugucaaaaaugcaauugggaucc

SEQ ID NO: 15665 - RNA, 25 nt, Artificial Sequence
  Synthetic Oligonucleotide
gaugucaaaaaugcaauugggauuc

SEQ ID NO: 15666 - RNA, 25 nt, Artificial Sequence
  Synthetic Oligonucleotide
gaugucaaaaaugcaauugggaccc

SEQ ID NO: 15667 - RNA, 25 nt, Artificial Sequence
  Synthetic Oligonucleotide
gaugucaaaaaugcaauugggcucc

SEQ ID NO: 15668 - RNA, 25 nt, Artificial Sequence
  Synthetic Oligonucleotide
gaugucaaaaaugcaauuggagucc

SEQ ID NO: 15669 - RNA, 25 nt, Artificial Sequence
  Synthetic Oligonucleotide
gaugucaaaaaugcaauuggauucc

SEQ ID NO: 15670 - RNA, 25 nt, Artificial Sequence
  Synthetic Oligonucleotide
gaugucaaaaaugcaauuggcgucc

SEQ ID NO: 15671 - RNA, 25 nt, Artificial Sequence
  Synthetic Oligonucleotide
gaugucaaaaaugcaauuagggucc

SEQ ID NO: 15672 - RNA, 25 nt, Artificial Sequence
  Synthetic Oligonucleotide
gaugucaaaaaugcaguuggggucc

SEQ ID NO: 15673 - RNA, 25 nt, Artificial Sequence
  Synthetic Oligonucleotide
gaugucaaaaaugcaguuggagucc

SEQ ID NO: 15674 - RNA, 25 nt, Artificial Sequence
  Synthetic Oligonucleotide
gaugucaaaaaugcaguuggcgucc

SEQ ID NO: 15675 - RNA, 25 nt, Artificial Sequence
  Synthetic Oligonucleotide
gaugucaaaaaugcgauuggggucc

SEQ ID NO: 15676 - RNA, 25 nt, Artificial Sequence
  Synthetic Oligonucleotide
gaugucaaaagugcaauuggcgucc

SEQ ID NO: 15677 - RNA, 25 nt, Artificial Sequence
  Synthetic Oligonucleotide
gaugucaaaauugcaauuggggucc

SEQ ID NO: 15678 - RNA, 25 nt, Artificial Sequence
  Synthetic Oligonucleotide
gaugucaaagaugcaauuggggucc

SEQ ID NO: 15679 - RNA, 25 nt, Artificial Sequence
  Synthetic Oligonucleotide
gauaucaaaaaugcaauuggcgucc

SEQ ID NO: 15680 - RNA, 25 nt, Artificial Sequence
  Synthetic Oligonucleotide
aaugucaaaaaugcaauuggggucc

SEQ ID NO: 15681 - RNA, 25 nt, Artificial Sequence
  Synthetic Oligonucleotide
aaugucaaagaugcaguuggggucc

SEQ ID NO: 15682 - RNA, 25 nt, Artificial Sequence
  Synthetic Oligonucleotide
gucaaaaaugcaauugggguccucg

SEQ ID NO: 15683 - RNA, 25 nt, Artificial Sequence
  Synthetic Oligonucleotide
gucaaaaaugcaauugggguucuca

SEQ ID NO: 15684 - RNA, 25 nt, Artificial Sequence
  Synthetic Oligonucleotide
gucaaaaaugcaauugggauccuca

SEQ ID NO: 15685 - RNA, 25 nt, Artificial Sequence
  Synthetic Oligonucleotide
gucaaaaaugcaauugggauucuca

SEQ ID NO: 15686 - RNA, 25 nt, Artificial Sequence
  Synthetic Oligonucleotide
gucaaaaaugcaauugggacccuca

SEQ ID NO: 15687 - RNA, 25 nt, Artificial Sequence
  Synthetic Oligonucleotide
gucaaaaaugcaauugggcuccuca

SEQ ID NO: 15688 - RNA, 25 nt, Artificial Sequence
  Synthetic Oligonucleotide
gucaaaaaugcaauuggaguccuca

SEQ ID NO: 15689 - RNA, 25 nt, Artificial Sequence
  Synthetic Oligonucleotide
gucaaaaaugcaauuggcguccuca

SEQ ID NO: 15690 - RNA, 25 nt, Artificial Sequence
  Synthetic Oligonucleotide
gucaaaaaugcaauuaggguccuca

SEQ ID NO: 15691 - RNA, 25 nt, Artificial Sequence
  Synthetic Oligonucleotide
gucaaaaaugcaguugggguccuca

SEQ ID NO: 15692 - RNA, 25 nt, Artificial Sequence
  Synthetic Oligonucleotide
gucaaaaaugcgauugggguccuca

SEQ ID NO: 15693 - RNA, 25 nt, Artificial Sequence
  Synthetic Oligonucleotide
gucaaaauugcaauugggguccuca

SEQ ID NO: 15694 - RNA, 25 nt, Artificial Sequence
  Synthetic Oligonucleotide
gucaaagaugcaauugggguccuca

SEQ ID NO: 15695 - RNA, 25 nt, Artificial Sequence
  Synthetic Oligonucleotide
gucaaaaaugcaauuggauuccuca

SEQ ID NO: 15696 - RNA, 25 nt, Artificial Sequence
  Synthetic Oligonucleotide
gucaaaaaugcaguuggaguccuca

SEQ ID NO: 15697 - RNA, 25 nt, Artificial Sequence
  Synthetic Oligonucleotide
gucaaaaaugcaguuggcguccuca

SEQ ID NO: 15698 - RNA, 25 nt, Artificial Sequence
  Synthetic Oligonucleotide
gucaaaagugcaauuggcguccuca

SEQ ID NO: 15699 - RNA, 25 nt, Artificial Sequence
  Synthetic Oligonucleotide
gucaaagaugcaguugggguccuca

SEQ ID NO: 15700 - RNA, 25 nt, Artificial Sequence
  Synthetic Oligonucleotide
aucaaaaaugcaauuggcguccuca

SEQ ID NO: 15701 - RNA, 25 nt, Artificial Sequence
  Synthetic Oligonucleotide
ucaaaaaugcaauugggguccucac

SEQ ID NO: 15702 - RNA, 25 nt, Artificial Sequence
  Synthetic Oligonucleotide
ucaaaaaugcaauugggguccucgu

SEQ ID NO: 15703 - RNA, 25 nt, Artificial Sequence
  Synthetic Oligonucleotide
ucaaaaaugcaauugggguucucau

SEQ ID NO: 15704 - RNA, 25 nt, Artificial Sequence
  Synthetic Oligonucleotide
ucaaaaaugcaauugggauccucau

SEQ ID NO: 15705 - RNA, 25 nt, Artificial Sequence
  Synthetic Oligonucleotide
ucaaaaaugcaauugggauucucau

SEQ ID NO: 15706 - RNA, 25 nt, Artificial Sequence
  Synthetic Oligonucleotide
ucaaaaaugcaauugggcuccucau

SEQ ID NO: 15707 - RNA, 25 nt, Artificial Sequence
  Synthetic Oligonucleotide
ucaaaaaugcaauuggaguccucau

SEQ ID NO: 15708 - RNA, 25 nt, Artificial Sequence
  Synthetic Oligonucleotide
ucaaaaaugcaauuggcguccucau

SEQ ID NO: 15709 - RNA, 25 nt, Artificial Sequence
  Synthetic Oligonucleotide
ucaaaaaugcaauuaggguccucau

SEQ ID NO: 15710 - RNA, 25 nt, Artificial Sequence
  Synthetic Oligonucleotide
ucaaaaaugcaguugggguccucau

SEQ ID NO: 15711 - RNA, 25 nt, Artificial Sequence
  Synthetic Oligonucleotide
ucaaaaaugcgauugggguccucau

SEQ ID NO: 15712 - RNA, 25 nt, Artificial Sequence
  Synthetic Oligonucleotide
ucaaaauugcaauugggguccucau

SEQ ID NO: 15713 - RNA, 25 nt, Artificial Sequence
  Synthetic Oligonucleotide
ucaaagaugcaauugggguccucau

SEQ ID NO: 15714 - RNA, 25 nt, Artificial Sequence
  Synthetic Oligonucleotide
ucaaaaaugcaauugggacccucau

SEQ ID NO: 15715 - RNA, 25 nt, Artificial Sequence
  Synthetic Oligonucleotide
ucaaaaaugcaauuggauuccucau

SEQ ID NO: 15716 - RNA, 25 nt, Artificial Sequence
  Synthetic Oligonucleotide
ucaaaaaugcaguuggaguccucau

SEQ ID NO: 15717 - RNA, 25 nt, Artificial Sequence
  Synthetic Oligonucleotide
ucaaaaaugcaguuggcguccucau

SEQ ID NO: 15718 - RNA, 25 nt, Artificial Sequence
  Synthetic Oligonucleotide
ucaaaagugcaauuggcguccucau

SEQ ID NO: 15719 - RNA, 25 nt, Artificial Sequence
  Synthetic Oligonucleotide
ucaaagaugcaguugggguccucau

SEQ ID NO: 15720 - RNA, 25 nt, Artificial Sequence
  Synthetic Oligonucleotide
caaaaaugcaauugggguccucacc

SEQ ID NO: 15721 - RNA, 25 nt, Artificial Sequence
  Synthetic Oligonucleotide
caaaaaugcaauugggguccucguc

SEQ ID NO: 15722 - RNA, 25 nt, Artificial Sequence
  Synthetic Oligonucleotide
caaaaaugcaauugggguucucauc

SEQ ID NO: 15723 - RNA, 25 nt, Artificial Sequence
  Synthetic Oligonucleotide
caaaaaugcaauugggauccucauc

SEQ ID NO: 15724 - RNA, 25 nt, Artificial Sequence
  Synthetic Oligonucleotide
caaaaaugcaauugggcuccucauc

SEQ ID NO: 15725 - RNA, 25 nt, Artificial Sequence
  Synthetic Oligonucleotide
caaaaaugcaauuggaguccucauc

SEQ ID NO: 15726 - RNA, 25 nt, Artificial Sequence
  Synthetic Oligonucleotide
caaaaaugcaauuggcguccucauc

SEQ ID NO: 15727 - RNA, 25 nt, Artificial Sequence
  Synthetic Oligonucleotide
caaaaaugcaauuaggguccucauc

SEQ ID NO: 15728 - RNA, 25 nt, Artificial Sequence
  Synthetic Oligonucleotide
caaaaaugcaguugggguccucauc

SEQ ID NO: 15729 - RNA, 25 nt, Artificial Sequence
  Synthetic Oligonucleotide
caaaaaugcgauugggguccucauc

SEQ ID NO: 15730 - RNA, 25 nt, Artificial Sequence
  Synthetic Oligonucleotide
caaaauugcaauugggguccucauc

SEQ ID NO: 15731 - RNA, 25 nt, Artificial Sequence
  Synthetic Oligonucleotide
caaagaugcaauugggguccucauc

SEQ ID NO: 15732 - RNA, 25 nt, Artificial Sequence
  Synthetic Oligonucleotide
caaaaaugcaauugggauucucauc

SEQ ID NO: 15733 - RNA, 25 nt, Artificial Sequence
  Synthetic Oligonucleotide
caaaaaugcaauugggacccucauc

SEQ ID NO: 15734 - RNA, 25 nt, Artificial Sequence
  Synthetic Oligonucleotide
caaaaaugcaauuggauuccucauc

SEQ ID NO: 15735 - RNA, 25 nt, Artificial Sequence
  Synthetic Oligonucleotide
caaaaaugcaguuggaguccucauc

SEQ ID NO: 15736 - RNA, 25 nt, Artificial Sequence
  Synthetic Oligonucleotide
caaaaaugcaguuggcguccucauc

SEQ ID NO: 15737 - RNA, 25 nt, Artificial Sequence
  Synthetic Oligonucleotide
caaaagugcaauuggcguccucauc

SEQ ID NO: 15738 - RNA, 25 nt, Artificial Sequence
  Synthetic Oligonucleotide
caaagaugcaguugggguccucauc

SEQ ID NO: 15739 - RNA, 25 nt, Artificial Sequence
  Synthetic Oligonucleotide
gaggaugucaaaaaugcaauuggga

SEQ ID NO: 15740 - RNA, 25 nt, Artificial Sequence
  Synthetic Oligonucleotide
gaggaugucaaaaaugcaauugggc

SEQ ID NO: 15741 - RNA, 25 nt, Artificial Sequence
  Synthetic Oligonucleotide
gaggaugucaaaaaugcaauuggag

SEQ ID NO: 15742 - RNA, 25 nt, Artificial Sequence
  Synthetic Oligonucleotide
gaggaugucaaaaaugcaauuggau

SEQ ID NO: 15743 - RNA, 25 nt, Artificial Sequence
  Synthetic Oligonucleotide
gaggaugucaaaaaugcaauuggcg

SEQ ID NO: 15744 - RNA, 25 nt, Artificial Sequence
  Synthetic Oligonucleotide
gaggaugucaaaaaugcaauuaggg

SEQ ID NO: 15745 - RNA, 25 nt, Artificial Sequence
  Synthetic Oligonucleotide
gaggaugucaaaaaugcaguugggg

SEQ ID NO: 15746 - RNA, 25 nt, Artificial Sequence
  Synthetic Oligonucleotide
gaggaugucaaaaaugcaguuggag

SEQ ID NO: 15747 - RNA, 25 nt, Artificial Sequence
  Synthetic Oligonucleotide
gaggaugucaaaaaugcaguuggcg

SEQ ID NO: 15748 - RNA, 25 nt, Artificial Sequence
  Synthetic Oligonucleotide
gaggaugucaaaaaugcgauugggg

SEQ ID NO: 15749 - RNA, 25 nt, Artificial Sequence
  Synthetic Oligonucleotide
gaggaugucaaaagugcaauuggcg

SEQ ID NO: 15750 - RNA, 25 nt, Artificial Sequence
  Synthetic Oligonucleotide
gaggaugucaaaauugcaauugggg

SEQ ID NO: 15751 - RNA, 25 nt, Artificial Sequence
  Synthetic Oligonucleotide
gaggaugucaaagaugcaauugggg

SEQ ID NO: 15752 - RNA, 25 nt, Artificial Sequence
  Synthetic Oligonucleotide
gaggauaucaaaaaugcaauuggcg

SEQ ID NO: 15753 - RNA, 25 nt, Artificial Sequence
  Synthetic Oligonucleotide
gagaaugucaaaaaugcaauugggg

SEQ ID NO: 15754 - RNA, 25 nt, Artificial Sequence
  Synthetic Oligonucleotide
aaggaugucaaaaaugcaauugggg

SEQ ID NO: 15755 - RNA, 25 nt, Artificial Sequence
  Synthetic Oligonucleotide
gagaaugucaaagaugcaguugggg

SEQ ID NO: 15756 - RNA, 25 nt, Artificial Sequence
  Synthetic Oligonucleotide
aaaaaugcaauugggguccucauca

SEQ ID NO: 15757 - RNA, 25 nt, Artificial Sequence
  Synthetic Oligonucleotide
aaaaaugcaauugggguccucaccg

SEQ ID NO: 15758 - RNA, 25 nt, Artificial Sequence
  Synthetic Oligonucleotide
aaaaaugcaauugggguccucgucg

SEQ ID NO: 15759 - RNA, 25 nt, Artificial Sequence
  Synthetic Oligonucleotide
aaaaaugcaauugggguucucaucg

SEQ ID NO: 15760 - RNA, 25 nt, Artificial Sequence
  Synthetic Oligonucleotide
aaaaaugcaauugggauccucaucg

SEQ ID NO: 15761 - RNA, 25 nt, Artificial Sequence
  Synthetic Oligonucleotide
aaaaaugcaauugggauccucauca

SEQ ID NO: 15762 - RNA, 25 nt, Artificial Sequence
  Synthetic Oligonucleotide
aaaaaugcaauugggcuccucaucg

SEQ ID NO: 15763 - RNA, 25 nt, Artificial Sequence
  Synthetic Oligonucleotide
aaaaaugcaauuggaguccucaucg

SEQ ID NO: 15764 - RNA, 25 nt, Artificial Sequence
  Synthetic Oligonucleotide
aaaaaugcaauuggcguccucaucg

SEQ ID NO: 15765 - RNA, 25 nt, Artificial Sequence
  Synthetic Oligonucleotide
aaaaaugcaauuaggguccucaucg

SEQ ID NO: 15766 - RNA, 25 nt, Artificial Sequence
  Synthetic Oligonucleotide
aaaaaugcaguugggguccucaucg

SEQ ID NO: 15767 - RNA, 25 nt, Artificial Sequence
  Synthetic Oligonucleotide
aaaaaugcgauugggguccucaucg

SEQ ID NO: 15768 - RNA, 25 nt, Artificial Sequence
  Synthetic Oligonucleotide
aaaauugcaauugggguccucaucg

SEQ ID NO: 15769 - RNA, 25 nt, Artificial Sequence
  Synthetic Oligonucleotide
aaagaugcaauugggguccucaucg

SEQ ID NO: 15770 - RNA, 25 nt, Artificial Sequence
  Synthetic Oligonucleotide
aaaaaugcaauugggauucucaucg

SEQ ID NO: 15771 - RNA, 25 nt, Artificial Sequence
  Synthetic Oligonucleotide
aaaaaugcaauugggacccucaucg

SEQ ID NO: 15772 - RNA, 25 nt, Artificial Sequence
  Synthetic Oligonucleotide
aaaaaugcaauugggacccucauca

SEQ ID NO: 15773 - RNA, 25 nt, Artificial Sequence
  Synthetic Oligonucleotide
aaaaaugcaauuggauuccucaucg

SEQ ID NO: 15774 - RNA, 25 nt, Artificial Sequence
  Synthetic Oligonucleotide
aaaaaugcaguuggaguccucaucg

SEQ ID NO: 15775 - RNA, 25 nt, Artificial Sequence
  Synthetic Oligonucleotide
aaaaaugcaguuggcguccucaucg

SEQ ID NO: 15776 - RNA, 25 nt, Artificial Sequence
  Synthetic Oligonucleotide
aaaagugcaauuggcguccucaucg

SEQ ID NO: 15777 - RNA, 25 nt, Artificial Sequence
  Synthetic Oligonucleotide
aaagaugcaguugggguccucaucg

SEQ ID NO: 15778 - RNA, 25 nt, Artificial Sequence
  Synthetic Oligonucleotide
aaaaugcaauugggguccucaucag

SEQ ID NO: 15779 - RNA, 25 nt, Artificial Sequence
  Synthetic Oligonucleotide
aaaaugcaauugggguccucaccgg

SEQ ID NO: 15780 - RNA, 25 nt, Artificial Sequence
  Synthetic Oligonucleotide
aaaaugcaauugggguccucgucgg

SEQ ID NO: 15781 - RNA, 25 nt, Artificial Sequence
  Synthetic Oligonucleotide
aaaaugcaauugggguucucaucgg

SEQ ID NO: 15782 - RNA, 25 nt, Artificial Sequence
  Synthetic Oligonucleotide
aaaaugcaauugggauccucaucgg

SEQ ID NO: 15783 - RNA, 25 nt, Artificial Sequence
  Synthetic Oligonucleotide
aaaaugcaauugggauccucaucaa

SEQ ID NO: 15784 - RNA, 25 nt, Artificial Sequence
  Synthetic Oligonucleotide
aaaaugcaauugggcuccucaucgg

SEQ ID NO: 15785 - RNA, 25 nt, Artificial Sequence
  Synthetic Oligonucleotide
aaaaugcaauuggaguccucaucgg

SEQ ID NO: 15786 - RNA, 25 nt, Artificial Sequence
  Synthetic Oligonucleotide
aaaaugcaauuggcguccucaucgg

SEQ ID NO: 15787 - RNA, 25 nt, Artificial Sequence
  Synthetic Oligonucleotide
aaaaugcaauuaggguccucaucgg

SEQ ID NO: 15788 - RNA, 25 nt, Artificial Sequence
  Synthetic Oligonucleotide
aaaaugcaguugggguccucaucgg

SEQ ID NO: 15789 - RNA, 25 nt, Artificial Sequence
  Synthetic Oligonucleotide
aaaaugcgauugggguccucaucgg

SEQ ID NO: 15790 - RNA, 25 nt, Artificial Sequence
  Synthetic Oligonucleotide
aaauugcaauugggguccucaucgg

SEQ ID NO: 15791 - RNA, 25 nt, Artificial Sequence
  Synthetic Oligonucleotide
aagaugcaauugggguccucaucgg

SEQ ID NO: 15792 - RNA, 25 nt, Artificial Sequence
  Synthetic Oligonucleotide
aaaaugcaauugggauucucaucgg

SEQ ID NO: 15793 - RNA, 25 nt, Artificial Sequence
  Synthetic Oligonucleotide
aaaaugcaauugggacccucaucgg

SEQ ID NO: 15794 - RNA, 25 nt, Artificial Sequence
  Synthetic Oligonucleotide
aaaaugcaauugggacccucaucaa

SEQ ID NO: 15795 - RNA, 25 nt, Artificial Sequence
  Synthetic Oligonucleotide
aaaaugcaauuggauuccucaucgg

SEQ ID NO: 15796 - RNA, 25 nt, Artificial Sequence
  Synthetic Oligonucleotide
aaaaugcaguuggaguccucaucgg

SEQ ID NO: 15797 - RNA, 25 nt, Artificial Sequence
  Synthetic Oligonucleotide
aaaaugcaguuggcguccucaucgg

SEQ ID NO: 15798 - RNA, 25 nt, Artificial Sequence
  Synthetic Oligonucleotide
aaagugcaauuggcguccucaucgg

SEQ ID NO: 15799 - RNA, 25 nt, Artificial Sequence
  Synthetic Oligonucleotide
aagaugcaguugggguccucaucgg

SEQ ID NO: 15800 - RNA, 25 nt, Artificial Sequence
  Synthetic Oligonucleotide
aagagggagcaauuguuggcgagau

SEQ ID NO: 15801 - RNA, 25 nt, Artificial Sequence
  Synthetic Oligonucleotide
aagagggagcaauuguuggcggaau

SEQ ID NO: 15802 - RNA, 25 nt, Artificial Sequence
  Synthetic Oligonucleotide
aagagggagcaauuguuggugaaau

SEQ ID NO: 15803 - RNA, 25 nt, Artificial Sequence
  Synthetic Oligonucleotide
aagagggagcaauuguugccgaaau

SEQ ID NO: 15804 - RNA, 25 nt, Artificial Sequence
  Synthetic Oligonucleotide
aagagggagcaauuguaggcgaaau

SEQ ID NO: 15805 - RNA, 25 nt, Artificial Sequence
  Synthetic Oligonucleotide
aagagggagcaauugugggcgaaau

SEQ ID NO: 15806 - RNA, 25 nt, Artificial Sequence
  Synthetic Oligonucleotide
aagagggagcaauugcuggcgaaau

SEQ ID NO: 15807 - RNA, 25 nt, Artificial Sequence
  Synthetic Oligonucleotide
aagagggagcaauuauuggcgaaau

SEQ ID NO: 15808 - RNA, 25 nt, Artificial Sequence
  Synthetic Oligonucleotide
aagagggagcaaucguuggagaaau

SEQ ID NO: 15809 - RNA, 25 nt, Artificial Sequence
  Synthetic Oligonucleotide
aagagggagcaaucguuggagagau

SEQ ID NO: 15810 - RNA, 25 nt, Artificial Sequence
  Synthetic Oligonucleotide
aagagggagcaguuguuggcgaaau

SEQ ID NO: 15811 - RNA, 25 nt, Artificial Sequence
  Synthetic Oligonucleotide
aagagggaguaauuguuggcgaaau

SEQ ID NO: 15812 - RNA, 25 nt, Artificial Sequence
  Synthetic Oligonucleotide
aagagggaacaauuguuggcgaaau

SEQ ID NO: 15813 - RNA, 25 nt, Artificial Sequence
  Synthetic Oligonucleotide
aagagggaacaauuguuggugaaau

SEQ ID NO: 15814 - RNA, 25 nt, Artificial Sequence
  Synthetic Oligonucleotide
aagagggcgcaauuguuggcgaaau

SEQ ID NO: 15815 - RNA, 25 nt, Artificial Sequence
  Synthetic Oligonucleotide
aagagggggcaauuguuggcgaaau

SEQ ID NO: 15816 - RNA, 25 nt, Artificial Sequence
  Synthetic Oligonucleotide
aagagggggcaauuguuggcgagau

SEQ ID NO: 15817 - RNA, 25 nt, Artificial Sequence
  Synthetic Oligonucleotide
aagagggugcaauuguuggcgaaau

SEQ ID NO: 15818 - RNA, 25 nt, Artificial Sequence
  Synthetic Oligonucleotide
aagaggaagcaauuguuggcgaaau

SEQ ID NO: 15819 - RNA, 25 nt, Artificial Sequence
  Synthetic Oligonucleotide
aagaaggagcaauuguuggcgaaau

SEQ ID NO: 15820 - RNA, 25 nt, Artificial Sequence
  Synthetic Oligonucleotide
aagauggagcaauuguuggcgaaau

SEQ ID NO: 15821 - RNA, 25 nt, Artificial Sequence
  Synthetic Oligonucleotide
aagcgggagcaauuguuggcgaaau

SEQ ID NO: 15822 - RNA, 25 nt, Artificial Sequence
  Synthetic Oligonucleotide
aaaagggagcaauuguuggcgaaau

SEQ ID NO: 15823 - RNA, 25 nt, Artificial Sequence
  Synthetic Oligonucleotide
aggagggagcaauuguuggcgaaau

SEQ ID NO: 15824 - RNA, 25 nt, Artificial Sequence
  Synthetic Oligonucleotide
aagagggagcaaucgugggagaaau

SEQ ID NO: 15825 - RNA, 25 nt, Artificial Sequence
  Synthetic Oligonucleotide
aagagggacgaauuguuggcgaaau

SEQ ID NO: 15826 - RNA, 25 nt, Artificial Sequence
  Synthetic Oligonucleotide
aagaggggacaauuguuggcgaaau

SEQ ID NO: 15827 - RNA, 25 nt, Artificial Sequence
  Synthetic Oligonucleotide
aagaaggagcaaucguuggagaaau

SEQ ID NO: 15828 - RNA, 25 nt, Artificial Sequence
  Synthetic Oligonucleotide
aggagggagcaauugucggagaaau

SEQ ID NO: 15829 - RNA, 25 nt, Artificial Sequence
  Synthetic Oligonucleotide
aggagggagcaaucguuggagaaau

SEQ ID NO: 15830 - RNA, 25 nt, Artificial Sequence
  Synthetic Oligonucleotide
aagaaggagcaaucguaggagaaau

SEQ ID NO: 15831 - RNA, 25 nt, Artificial Sequence
  Synthetic Oligonucleotide
aagaaggagcaaucguaggggaaau

SEQ ID NO: 15832 - RNA, 25 nt, Artificial Sequence
  Synthetic Oligonucleotide
aagaaggagcaaucgugggagaaau

SEQ ID NO: 15833 - RNA, 25 nt, Artificial Sequence
  Synthetic Oligonucleotide
aagaaggggcaauuguaggcgaaau

SEQ ID NO: 15834 - RNA, 25 nt, Artificial Sequence
  Synthetic Oligonucleotide
aagggggagcaaucgugggagaaau

SEQ ID NO: 15835 - RNA, 25 nt, Artificial Sequence
  Synthetic Oligonucleotide
acgaaggagcaauugugggcgaaau

SEQ ID NO: 15836 - RNA, 25 nt, Artificial Sequence
  Synthetic Oligonucleotide
gaagagggagcaauuguuggcgaga

SEQ ID NO: 15837 - RNA, 25 nt, Artificial Sequence
  Synthetic Oligonucleotide
gaagagggagcaauuguuggcggaa

SEQ ID NO: 15838 - RNA, 25 nt, Artificial Sequence
  Synthetic Oligonucleotide
gaagagggagcaauuguuggugaaa

SEQ ID NO: 15839 - RNA, 25 nt, Artificial Sequence
  Synthetic Oligonucleotide
gaagagggagcaauuguugccgaaa

SEQ ID NO: 15840 - RNA, 25 nt, Artificial Sequence
  Synthetic Oligonucleotide
gaagagggagcaauuguaggcgaaa

SEQ ID NO: 15841 - RNA, 25 nt, Artificial Sequence
  Synthetic Oligonucleotide
gaagagggagcaauugugggcgaaa

SEQ ID NO: 15842 - RNA, 25 nt, Artificial Sequence
  Synthetic Oligonucleotide
gaagagggagcaauugcuggcgaaa

SEQ ID NO: 15843 - RNA, 25 nt, Artificial Sequence
  Synthetic Oligonucleotide
gaagagggagcaauuauuggcgaaa

SEQ ID NO: 15844 - RNA, 25 nt, Artificial Sequence
  Synthetic Oligonucleotide
gaagagggagcaaucguuggagaaa

SEQ ID NO: 15845 - RNA, 25 nt, Artificial Sequence
  Synthetic Oligonucleotide
gaagagggagcaaucguuggagaga

SEQ ID NO: 15846 - RNA, 25 nt, Artificial Sequence
  Synthetic Oligonucleotide
gaagagggagcaguuguuggcgaaa

SEQ ID NO: 15847 - RNA, 25 nt, Artificial Sequence
  Synthetic Oligonucleotide
gaagagggaguaauuguuggcgaaa

SEQ ID NO: 15848 - RNA, 25 nt, Artificial Sequence
  Synthetic Oligonucleotide
gaagagggaacaauuguuggcgaaa

SEQ ID NO: 15849 - RNA, 25 nt, Artificial Sequence
  Synthetic Oligonucleotide
gaagagggaacaauuguuggugaaa

SEQ ID NO: 15850 - RNA, 25 nt, Artificial Sequence
  Synthetic Oligonucleotide
gaagagggcgcaauuguuggcgaaa

SEQ ID NO: 15851 - RNA, 25 nt, Artificial Sequence
  Synthetic Oligonucleotide
gaagagggggcaauuguuggcgaaa

SEQ ID NO: 15852 - RNA, 25 nt, Artificial Sequence
  Synthetic Oligonucleotide
gaagagggggcaauuguuggcgaga

SEQ ID NO: 15853 - RNA, 25 nt, Artificial Sequence
  Synthetic Oligonucleotide
gaagagggugcaauuguuggcgaaa

SEQ ID NO: 15854 - RNA, 25 nt, Artificial Sequence
  Synthetic Oligonucleotide
gaagaggaagcaauuguuggcgaaa

SEQ ID NO: 15855 - RNA, 25 nt, Artificial Sequence
  Synthetic Oligonucleotide
gaagaaggagcaauuguuggcgaaa

SEQ ID NO: 15856 - RNA, 25 nt, Artificial Sequence
  Synthetic Oligonucleotide
gaagauggagcaauuguuggcgaaa

SEQ ID NO: 15857 - RNA, 25 nt, Artificial Sequence
  Synthetic Oligonucleotide
gaagcgggagcaauuguuggcgaaa

SEQ ID NO: 15858 - RNA, 25 nt, Artificial Sequence
  Synthetic Oligonucleotide
gaaaagggagcaauuguuggcgaaa

SEQ ID NO: 15859 - RNA, 25 nt, Artificial Sequence
  Synthetic Oligonucleotide
gaggagggagcaauuguuggcgaaa

SEQ ID NO: 15860 - RNA, 25 nt, Artificial Sequence
  Synthetic Oligonucleotide
aaagagggagcaauuguuggcgaaa

SEQ ID NO: 15861 - RNA, 25 nt, Artificial Sequence
  Synthetic Oligonucleotide
gaagagggagcaaucgugggagaaa

SEQ ID NO: 15862 - RNA, 25 nt, Artificial Sequence
  Synthetic Oligonucleotide
gaagagggacgaauuguuggcgaaa

SEQ ID NO: 15863 - RNA, 25 nt, Artificial Sequence
  Synthetic Oligonucleotide
gaagaggggacaauuguuggcgaaa

SEQ ID NO: 15864 - RNA, 25 nt, Artificial Sequence
  Synthetic Oligonucleotide
gaagaaggagcaaucguuggagaaa

SEQ ID NO: 15865 - RNA, 25 nt, Artificial Sequence
  Synthetic Oligonucleotide
gaggagggagcaauugucggagaaa

SEQ ID NO: 15866 - RNA, 25 nt, Artificial Sequence
  Synthetic Oligonucleotide
gaggagggagcaaucguuggagaaa

SEQ ID NO: 15867 - RNA, 25 nt, Artificial Sequence
  Synthetic Oligonucleotide
gaagaaggagcaaucguaggagaaa

SEQ ID NO: 15868 - RNA, 25 nt, Artificial Sequence
  Synthetic Oligonucleotide
gaagaaggagcaaucguaggggaaa

SEQ ID NO: 15869 - RNA, 25 nt, Artificial Sequence
  Synthetic Oligonucleotide
gaagaaggagcaaucgugggagaaa

SEQ ID NO: 15870 - RNA, 25 nt, Artificial Sequence
  Synthetic Oligonucleotide
gaagaaggggcaauuguaggcgaaa

SEQ ID NO: 15871 - RNA, 25 nt, Artificial Sequence
  Synthetic Oligonucleotide
gaagggggagcaaucgugggagaaa

SEQ ID NO: 15872 - RNA, 25 nt, Artificial Sequence
  Synthetic Oligonucleotide
gacgaaggagcaauugugggcgaaa

SEQ ID NO: 15873 - RNA, 25 nt, Artificial Sequence
  Synthetic Oligonucleotide
ucaccgaagagggagcaauuguugc

SEQ ID NO: 15874 - RNA, 25 nt, Artificial Sequence
  Synthetic Oligonucleotide
ucaccgaagagggagcaauuguagg

SEQ ID NO: 15875 - RNA, 25 nt, Artificial Sequence
  Synthetic Oligonucleotide
ucaccgaagagggagcaauuguggg

SEQ ID NO: 15876 - RNA, 25 nt, Artificial Sequence
  Synthetic Oligonucleotide
ucaccgaagagggagcaauugcugg

SEQ ID NO: 15877 - RNA, 25 nt, Artificial Sequence
  Synthetic Oligonucleotide
ucaccgaagagggagcaauuauugg

SEQ ID NO: 15878 - RNA, 25 nt, Artificial Sequence
  Synthetic Oligonucleotide
ucaccgaagagggagcaaucguugg

SEQ ID NO: 15879 - RNA, 25 nt, Artificial Sequence
  Synthetic Oligonucleotide
ucaccgaagagggagcaguuguugg

SEQ ID NO: 15880 - RNA, 25 nt, Artificial Sequence
  Synthetic Oligonucleotide
ucaccgaagagggaguaauuguugg

SEQ ID NO: 15881 - RNA, 25 nt, Artificial Sequence
  Synthetic Oligonucleotide
ucaccgaagagggaacaauuguugg

SEQ ID NO: 15882 - RNA, 25 nt, Artificial Sequence
  Synthetic Oligonucleotide
ucaccgaagagggcgcaauuguugg

SEQ ID NO: 15883 - RNA, 25 nt, Artificial Sequence
  Synthetic Oligonucleotide
ucaccgaagagggggcaauuguugg

SEQ ID NO: 15884 - RNA, 25 nt, Artificial Sequence
  Synthetic Oligonucleotide
ucaccgaagagggugcaauuguugg

SEQ ID NO: 15885 - RNA, 25 nt, Artificial Sequence
  Synthetic Oligonucleotide
ucaccgaagaggaagcaauuguugg

SEQ ID NO: 15886 - RNA, 25 nt, Artificial Sequence
  Synthetic Oligonucleotide
ucaccgaagaaggagcaauuguugg

SEQ ID NO: 15887 - RNA, 25 nt, Artificial Sequence
  Synthetic Oligonucleotide
ucaccgaagauggagcaauuguugg

SEQ ID NO: 15888 - RNA, 25 nt, Artificial Sequence
  Synthetic Oligonucleotide
ucaccgaagcgggagcaauuguugg

SEQ ID NO: 15889 - RNA, 25 nt, Artificial Sequence
  Synthetic Oligonucleotide
ucaccgaaaagggagcaauuguugg

SEQ ID NO: 15890 - RNA, 25 nt, Artificial Sequence
  Synthetic Oligonucleotide
ucaccgaggagggagcaauuguugg

SEQ ID NO: 15891 - RNA, 25 nt, Artificial Sequence
  Synthetic Oligonucleotide
ucaccgaggagggagcaauugucgg

SEQ ID NO: 15892 - RNA, 25 nt, Artificial Sequence
  Synthetic Oligonucleotide
ucaccaaagagggagcaauuguugg

SEQ ID NO: 15893 - RNA, 25 nt, Artificial Sequence
  Synthetic Oligonucleotide
ucacagaagagggagcaauuguugg

SEQ ID NO: 15894 - RNA, 25 nt, Artificial Sequence
  Synthetic Oligonucleotide
ucacagaagagggagcaaucguggg

SEQ ID NO: 15895 - RNA, 25 nt, Artificial Sequence
  Synthetic Oligonucleotide
ucacugaagagggagcaauuguugg

SEQ ID NO: 15896 - RNA, 25 nt, Artificial Sequence
  Synthetic Oligonucleotide
ucaucgaagagggagcaauuguugg

SEQ ID NO: 15897 - RNA, 25 nt, Artificial Sequence
  Synthetic Oligonucleotide
uuaccgaagagggagcaauuguugg

SEQ ID NO: 15898 - RNA, 25 nt, Artificial Sequence
  Synthetic Oligonucleotide
ucaccgaagagggacgaauuguugg

SEQ ID NO: 15899 - RNA, 25 nt, Artificial Sequence
  Synthetic Oligonucleotide
ucaccgaagaggggacaauuguugg

SEQ ID NO: 15900 - RNA, 25 nt, Artificial Sequence
  Synthetic Oligonucleotide
ucacagaagaaggagcaaucguugg

SEQ ID NO: 15901 - RNA, 25 nt, Artificial Sequence
  Synthetic Oligonucleotide
ucacagaagaaggagcaaucguagg

SEQ ID NO: 15902 - RNA, 25 nt, Artificial Sequence
  Synthetic Oligonucleotide
ucacagaagaaggagcaaucguggg

SEQ ID NO: 15903 - RNA, 25 nt, Artificial Sequence
  Synthetic Oligonucleotide
ucacagaagggggagcaaucguggg

SEQ ID NO: 15904 - RNA, 25 nt, Artificial Sequence
  Synthetic Oligonucleotide
ucacugaagaaggagcaaucaucgg

SEQ ID NO: 15905 - RNA, 25 nt, Artificial Sequence
  Synthetic Oligonucleotide
ucacugaggagggagcaaucguugg

SEQ ID NO: 15906 - RNA, 25 nt, Artificial Sequence
  Synthetic Oligonucleotide
ucacagaagaaggggcaaucguggg

SEQ ID NO: 15907 - RNA, 25 nt, Artificial Sequence
  Synthetic Oligonucleotide
ucacagaaggaggagcaaucguggg

SEQ ID NO: 15908 - RNA, 25 nt, Artificial Sequence
  Synthetic Oligonucleotide
ucacggaagaaggggcaauuguagg

SEQ ID NO: 15909 - RNA, 25 nt, Artificial Sequence
  Synthetic Oligonucleotide
accgaagagggagcaauuguuggug

SEQ ID NO: 15910 - RNA, 25 nt, Artificial Sequence
  Synthetic Oligonucleotide
accgaagagggagcaauuguugccg

SEQ ID NO: 15911 - RNA, 25 nt, Artificial Sequence
  Synthetic Oligonucleotide
accgaagagggagcaauuguaggcg

SEQ ID NO: 15912 - RNA, 25 nt, Artificial Sequence
  Synthetic Oligonucleotide
accgaagagggagcaauugugggcg

SEQ ID NO: 15913 - RNA, 25 nt, Artificial Sequence
  Synthetic Oligonucleotide
accgaagagggagcaauugcuggcg

SEQ ID NO: 15914 - RNA, 25 nt, Artificial Sequence
  Synthetic Oligonucleotide
accgaagagggagcaauuauuggcg

SEQ ID NO: 15915 - RNA, 25 nt, Artificial Sequence
  Synthetic Oligonucleotide
accgaagagggagcaaucguuggag

SEQ ID NO: 15916 - RNA, 25 nt, Artificial Sequence
  Synthetic Oligonucleotide
accgaagagggagcaguuguuggcg

SEQ ID NO: 15917 - RNA, 25 nt, Artificial Sequence
  Synthetic Oligonucleotide
accgaagagggaguaauuguuggcg

SEQ ID NO: 15918 - RNA, 25 nt, Artificial Sequence
  Synthetic Oligonucleotide
accgaagagggaacaauuguuggcg

SEQ ID NO: 15919 - RNA, 25 nt, Artificial Sequence
  Synthetic Oligonucleotide
accgaagagggaacaauuguuggug

SEQ ID NO: 15920 - RNA, 25 nt, Artificial Sequence
  Synthetic Oligonucleotide
accgaagagggcgcaauuguuggcg

SEQ ID NO: 15921 - RNA, 25 nt, Artificial Sequence
  Synthetic Oligonucleotide
accgaagagggggcaauuguuggcg

SEQ ID NO: 15922 - RNA, 25 nt, Artificial Sequence
  Synthetic Oligonucleotide
accgaagagggugcaauuguuggcg

SEQ ID NO: 15923 - RNA, 25 nt, Artificial Sequence
  Synthetic Oligonucleotide
accgaagaggaagcaauuguuggcg

SEQ ID NO: 15924 - RNA, 25 nt, Artificial Sequence
  Synthetic Oligonucleotide
accgaagaaggagcaauuguuggcg

SEQ ID NO: 15925 - RNA, 25 nt, Artificial Sequence
  Synthetic Oligonucleotide
accgaagauggagcaauuguuggcg

SEQ ID NO: 15926 - RNA, 25 nt, Artificial Sequence
  Synthetic Oligonucleotide
accgaagcgggagcaauuguuggcg

SEQ ID NO: 15927 - RNA, 25 nt, Artificial Sequence
  Synthetic Oligonucleotide
accgaaaagggagcaauuguuggcg

SEQ ID NO: 15928 - RNA, 25 nt, Artificial Sequence
  Synthetic Oligonucleotide
accgaggagggagcaauuguuggcg

SEQ ID NO: 15929 - RNA, 25 nt, Artificial Sequence
  Synthetic Oligonucleotide
accgaggagggagcaauugucggag

SEQ ID NO: 15930 - RNA, 25 nt, Artificial Sequence
  Synthetic Oligonucleotide
accaaagagggagcaauuguuggcg

SEQ ID NO: 15931 - RNA, 25 nt, Artificial Sequence
  Synthetic Oligonucleotide
acagaagagggagcaauuguuggcg

SEQ ID NO: 15932 - RNA, 25 nt, Artificial Sequence
  Synthetic Oligonucleotide
acugaagagggagcaauuguuggcg

SEQ ID NO: 15933 - RNA, 25 nt, Artificial Sequence
  Synthetic Oligonucleotide
aucgaagagggagcaauuguuggcg

SEQ ID NO: 15934 - RNA, 25 nt, Artificial Sequence
  Synthetic Oligonucleotide
accgaagagggacgaauuguuggcg

SEQ ID NO: 15935 - RNA, 25 nt, Artificial Sequence
  Synthetic Oligonucleotide
accgaagaggggacaauuguuggcg

SEQ ID NO: 15936 - RNA, 25 nt, Artificial Sequence
  Synthetic Oligonucleotide
acagaagagggagcaaucgugggag

SEQ ID NO: 15937 - RNA, 25 nt, Artificial Sequence
  Synthetic Oligonucleotide
acagaagaaggagcaaucguuggag

SEQ ID NO: 15938 - RNA, 25 nt, Artificial Sequence
  Synthetic Oligonucleotide
acagaagaaggagcaaucguaggag

SEQ ID NO: 15939 - RNA, 25 nt, Artificial Sequence
  Synthetic Oligonucleotide
acagaagaaggagcaaucguagggg

SEQ ID NO: 15940 - RNA, 25 nt, Artificial Sequence
  Synthetic Oligonucleotide
acagaagaaggagcaaucgugggag

SEQ ID NO: 15941 - RNA, 25 nt, Artificial Sequence
  Synthetic Oligonucleotide
acagaagggggagcaaucgugggag

SEQ ID NO: 15942 - RNA, 25 nt, Artificial Sequence
  Synthetic Oligonucleotide
acagacgaaggagcaauugugggcg

SEQ ID NO: 15943 - RNA, 25 nt, Artificial Sequence
  Synthetic Oligonucleotide
acggaagaaggggcaauuguaggcg

SEQ ID NO: 15944 - RNA, 25 nt, Artificial Sequence
  Synthetic Oligonucleotide
acugaggagggagcaaucguuggag

SEQ ID NO: 15945 - RNA, 25 nt, Artificial Sequence
  Synthetic Oligonucleotide
caccgaagagggagcaauuguuggu

SEQ ID NO: 15946 - RNA, 25 nt, Artificial Sequence
  Synthetic Oligonucleotide
caccgaagagggagcaauuguugcc

SEQ ID NO: 15947 - RNA, 25 nt, Artificial Sequence
  Synthetic Oligonucleotide
caccgaagagggagcaauuguaggc

SEQ ID NO: 15948 - RNA, 25 nt, Artificial Sequence
  Synthetic Oligonucleotide
caccgaagagggagcaauugugggc

SEQ ID NO: 15949 - RNA, 25 nt, Artificial Sequence
  Synthetic Oligonucleotide
caccgaagagggagcaauugcuggc

SEQ ID NO: 15950 - RNA, 25 nt, Artificial Sequence
  Synthetic Oligonucleotide
caccgaagagggagcaauuauuggc

SEQ ID NO: 15951 - RNA, 25 nt, Artificial Sequence
  Synthetic Oligonucleotide
caccgaagagggagcaaucguugga

SEQ ID NO: 15952 - RNA, 25 nt, Artificial Sequence
  Synthetic Oligonucleotide
caccgaagagggagcaguuguuggc

SEQ ID NO: 15953 - RNA, 25 nt, Artificial Sequence
  Synthetic Oligonucleotide
caccgaagagggaguaauuguuggc

SEQ ID NO: 15954 - RNA, 25 nt, Artificial Sequence
  Synthetic Oligonucleotide
caccgaagagggaacaauuguuggc

SEQ ID NO: 15955 - RNA, 25 nt, Artificial Sequence
  Synthetic Oligonucleotide
caccgaagagggaacaauuguuggu

SEQ ID NO: 15956 - RNA, 25 nt, Artificial Sequence
  Synthetic Oligonucleotide
caccgaagagggcgcaauuguuggc

SEQ ID NO: 15957 - RNA, 25 nt, Artificial Sequence
  Synthetic Oligonucleotide
caccgaagagggggcaauuguuggc

SEQ ID NO: 15958 - RNA, 25 nt, Artificial Sequence
  Synthetic Oligonucleotide
caccgaagagggugcaauuguuggc

SEQ ID NO: 15959 - RNA, 25 nt, Artificial Sequence
  Synthetic Oligonucleotide
caccgaagaggaagcaauuguuggc

SEQ ID NO: 15960 - RNA, 25 nt, Artificial Sequence
  Synthetic Oligonucleotide
caccgaagaaggagcaauuguuggc

SEQ ID NO: 15961 - RNA, 25 nt, Artificial Sequence
  Synthetic Oligonucleotide
caccgaagauggagcaauuguuggc

SEQ ID NO: 15962 - RNA, 25 nt, Artificial Sequence
  Synthetic Oligonucleotide
caccgaagcgggagcaauuguuggc

SEQ ID NO: 15963 - RNA, 25 nt, Artificial Sequence
  Synthetic Oligonucleotide
caccgaaaagggagcaauuguuggc

SEQ ID NO: 15964 - RNA, 25 nt, Artificial Sequence
  Synthetic Oligonucleotide
caccgaggagggagcaauuguuggc

SEQ ID NO: 15965 - RNA, 25 nt, Artificial Sequence
  Synthetic Oligonucleotide
caccgaggagggagcaauugucgga

SEQ ID NO: 15966 - RNA, 25 nt, Artificial Sequence
  Synthetic Oligonucleotide
caccaaagagggagcaauuguuggc

SEQ ID NO: 15967 - RNA, 25 nt, Artificial Sequence
  Synthetic Oligonucleotide
cacagaagagggagcaauuguuggc

SEQ ID NO: 15968 - RNA, 25 nt, Artificial Sequence
  Synthetic Oligonucleotide
cacugaagagggagcaauuguuggc

SEQ ID NO: 15969 - RNA, 25 nt, Artificial Sequence
  Synthetic Oligonucleotide
caucgaagagggagcaauuguuggc

SEQ ID NO: 15970 - RNA, 25 nt, Artificial Sequence
  Synthetic Oligonucleotide
uaccgaagagggagcaauuguuggc

SEQ ID NO: 15971 - RNA, 25 nt, Artificial Sequence
  Synthetic Oligonucleotide
caccgaagagggacgaauuguuggc

SEQ ID NO: 15972 - RNA, 25 nt, Artificial Sequence
  Synthetic Oligonucleotide
caccgaagaggggacaauuguuggc

SEQ ID NO: 15973 - RNA, 25 nt, Artificial Sequence
  Synthetic Oligonucleotide
cacagaagagggagcaaucguggga

SEQ ID NO: 15974 - RNA, 25 nt, Artificial Sequence
  Synthetic Oligonucleotide
cacagaagaaggagcaaucguugga

SEQ ID NO: 15975 - RNA, 25 nt, Artificial Sequence
  Synthetic Oligonucleotide
cacagaagaaggagcaaucguagga

SEQ ID NO: 15976 - RNA, 25 nt, Artificial Sequence
  Synthetic Oligonucleotide
cacagaagaaggagcaaucguaggg

SEQ ID NO: 15977 - RNA, 25 nt, Artificial Sequence
  Synthetic Oligonucleotide
cacagaagaaggagcaaucguggga

SEQ ID NO: 15978 - RNA, 25 nt, Artificial Sequence
  Synthetic Oligonucleotide
cacagaagggggagcaaucguggga

SEQ ID NO: 15979 - RNA, 25 nt, Artificial Sequence
  Synthetic Oligonucleotide
cacggaagaaggggcaauuguaggc

SEQ ID NO: 15980 - RNA, 25 nt, Artificial Sequence
  Synthetic Oligonucleotide
cacugaagaaggagcaaucaucggu

SEQ ID NO: 15981 - RNA, 25 nt, Artificial Sequence
  Synthetic Oligonucleotide
cacugaggagggagcaaucguugga

SEQ ID NO: 15982 - RNA, 25 nt, Artificial Sequence
  Synthetic Oligonucleotide
ccgaagagggagcaauuguuggcgg

SEQ ID NO: 15983 - RNA, 25 nt, Artificial Sequence
  Synthetic Oligonucleotide
ccgaagagggagcaauuguugguga

SEQ ID NO: 15984 - RNA, 25 nt, Artificial Sequence
  Synthetic Oligonucleotide
ccgaagagggagcaauuguugccga

SEQ ID NO: 15985 - RNA, 25 nt, Artificial Sequence
  Synthetic Oligonucleotide
ccgaagagggagcaauuguaggcga

SEQ ID NO: 15986 - RNA, 25 nt, Artificial Sequence
  Synthetic Oligonucleotide
ccgaagagggagcaauugugggcga

SEQ ID NO: 15987 - RNA, 25 nt, Artificial Sequence
  Synthetic Oligonucleotide
ccgaagagggagcaauugcuggcga

SEQ ID NO: 15988 - RNA, 25 nt, Artificial Sequence
  Synthetic Oligonucleotide
ccgaagagggagcaauuauuggcga

SEQ ID NO: 15989 - RNA, 25 nt, Artificial Sequence
  Synthetic Oligonucleotide
ccgaagagggagcaaucguuggaga

SEQ ID NO: 15990 - RNA, 25 nt, Artificial Sequence
  Synthetic Oligonucleotide
ccgaagagggagcaguuguuggcga

SEQ ID NO: 15991 - RNA, 25 nt, Artificial Sequence
  Synthetic Oligonucleotide
ccgaagagggaguaauuguuggcga

SEQ ID NO: 15992 - RNA, 25 nt, Artificial Sequence
  Synthetic Oligonucleotide
ccgaagagggaacaauuguuggcga

SEQ ID NO: 15993 - RNA, 25 nt, Artificial Sequence
  Synthetic Oligonucleotide
ccgaagagggaacaauuguugguga

SEQ ID NO: 15994 - RNA, 25 nt, Artificial Sequence
  Synthetic Oligonucleotide
ccgaagagggcgcaauuguuggcga

SEQ ID NO: 15995 - RNA, 25 nt, Artificial Sequence
  Synthetic Oligonucleotide
ccgaagagggggcaauuguuggcga

SEQ ID NO: 15996 - RNA, 25 nt, Artificial Sequence
  Synthetic Oligonucleotide
ccgaagagggugcaauuguuggcga

SEQ ID NO: 15997 - RNA, 25 nt, Artificial Sequence
  Synthetic Oligonucleotide
ccgaagaggaagcaauuguuggcga

SEQ ID NO: 15998 - RNA, 25 nt, Artificial Sequence
  Synthetic Oligonucleotide
ccgaagaaggagcaauuguuggcga

SEQ ID NO: 15999 - RNA, 25 nt, Artificial Sequence
  Synthetic Oligonucleotide
ccgaagauggagcaauuguuggcga

SEQ ID NO: 16000 - RNA, 25 nt, Artificial Sequence
  Synthetic Oligonucleotide
ccgaagcgggagcaauuguuggcga

SEQ ID NO: 16001 - RNA, 25 nt, Artificial Sequence
  Synthetic Oligonucleotide
ccgaaaagggagcaauuguuggcga

SEQ ID NO: 16002 - RNA, 25 nt, Artificial Sequence
  Synthetic Oligonucleotide
ccgaggagggagcaauuguuggcga

SEQ ID NO: 16003 - RNA, 25 nt, Artificial Sequence
  Synthetic Oligonucleotide
ccgaggagggagcaauugucggaga

SEQ ID NO: 16004 - RNA, 25 nt, Artificial Sequence
  Synthetic Oligonucleotide
ccaaagagggagcaauuguuggcga

SEQ ID NO: 16005 - RNA, 25 nt, Artificial Sequence
  Synthetic Oligonucleotide
cagaagagggagcaauuguuggcga

SEQ ID NO: 16006 - RNA, 25 nt, Artificial Sequence
  Synthetic Oligonucleotide
cugaagagggagcaauuguuggcga

SEQ ID NO: 16007 - RNA, 25 nt, Artificial Sequence
  Synthetic Oligonucleotide
ucgaagagggagcaauuguuggcga

SEQ ID NO: 16008 - RNA, 25 nt, Artificial Sequence
  Synthetic Oligonucleotide
ccgaagagggacgaauuguuggcga

SEQ ID NO: 16009 - RNA, 25 nt, Artificial Sequence
  Synthetic Oligonucleotide
ccgaagaggggacaauuguuggcga

SEQ ID NO: 16010 - RNA, 25 nt, Artificial Sequence
  Synthetic Oligonucleotide
cagaagagggagcaaucgugggaga

SEQ ID NO: 16011 - RNA, 25 nt, Artificial Sequence
  Synthetic Oligonucleotide
cagaagaaggagcaaucguuggaga

SEQ ID NO: 16012 - RNA, 25 nt, Artificial Sequence
  Synthetic Oligonucleotide
cagaagaaggagcaaucguaggaga

SEQ ID NO: 16013 - RNA, 25 nt, Artificial Sequence
  Synthetic Oligonucleotide
cagaagaaggagcaaucguagggga

SEQ ID NO: 16014 - RNA, 25 nt, Artificial Sequence
  Synthetic Oligonucleotide
cagaagaaggagcaaucgugggaga

SEQ ID NO: 16015 - RNA, 25 nt, Artificial Sequence
  Synthetic Oligonucleotide
cagaagggggagcaaucgugggaga

SEQ ID NO: 16016 - RNA, 25 nt, Artificial Sequence
  Synthetic Oligonucleotide
cagacgaaggagcaauugugggcga

SEQ ID NO: 16017 - RNA, 25 nt, Artificial Sequence
  Synthetic Oligonucleotide
cggaagaaggggcaauuguaggcga

SEQ ID NO: 16018 - RNA, 25 nt, Artificial Sequence
  Synthetic Oligonucleotide
cugaggagggagcaaucguuggaga

SEQ ID NO: 16019 - RNA, 25 nt, Artificial Sequence
  Synthetic Oligonucleotide
uucaccgaagagggagcaauuguag

SEQ ID NO: 16020 - RNA, 25 nt, Artificial Sequence
  Synthetic Oligonucleotide
uucaccgaagagggagcaauugugg

SEQ ID NO: 16021 - RNA, 25 nt, Artificial Sequence
  Synthetic Oligonucleotide
uucaccgaagagggagcaauugcug

SEQ ID NO: 16022 - RNA, 25 nt, Artificial Sequence
  Synthetic Oligonucleotide
uucaccgaagagggagcaauuauug

SEQ ID NO: 16023 - RNA, 25 nt, Artificial Sequence
  Synthetic Oligonucleotide
uucaccgaagagggagcaaucguug

SEQ ID NO: 16024 - RNA, 25 nt, Artificial Sequence
  Synthetic Oligonucleotide
uucaccgaagagggagcaguuguug

SEQ ID NO: 16025 - RNA, 25 nt, Artificial Sequence
  Synthetic Oligonucleotide
uucaccgaagagggaguaauuguug

SEQ ID NO: 16026 - RNA, 25 nt, Artificial Sequence
  Synthetic Oligonucleotide
uucaccgaagagggaacaauuguug

SEQ ID NO: 16027 - RNA, 25 nt, Artificial Sequence
  Synthetic Oligonucleotide
uucaccgaagagggcgcaauuguug

SEQ ID NO: 16028 - RNA, 25 nt, Artificial Sequence
  Synthetic Oligonucleotide
uucaccgaagagggggcaauuguug

SEQ ID NO: 16029 - RNA, 25 nt, Artificial Sequence
  Synthetic Oligonucleotide
uucaccgaagagggugcaauuguug

SEQ ID NO: 16030 - RNA, 25 nt, Artificial Sequence
  Synthetic Oligonucleotide
uucaccgaagaggaagcaauuguug

SEQ ID NO: 16031 - RNA, 25 nt, Artificial Sequence
  Synthetic Oligonucleotide
uucaccgaagaaggagcaauuguug

SEQ ID NO: 16032 - RNA, 25 nt, Artificial Sequence
  Synthetic Oligonucleotide
uucaccgaagauggagcaauuguug

SEQ ID NO: 16033 - RNA, 25 nt, Artificial Sequence
  Synthetic Oligonucleotide
uucaccgaagcgggagcaauuguug

SEQ ID NO: 16034 - RNA, 25 nt, Artificial Sequence
  Synthetic Oligonucleotide
uucaccgaaaagggagcaauuguug

SEQ ID NO: 16035 - RNA, 25 nt, Artificial Sequence
  Synthetic Oligonucleotide
uucaccgaggagggagcaauuguug

SEQ ID NO: 16036 - RNA, 25 nt, Artificial Sequence
  Synthetic Oligonucleotide
uucaccgaggagggagcaauugucg

SEQ ID NO: 16037 - RNA, 25 nt, Artificial Sequence
  Synthetic Oligonucleotide
uucaccaaagagggagcaauuguug

SEQ ID NO: 16038 - RNA, 25 nt, Artificial Sequence
  Synthetic Oligonucleotide
uucacagaagagggagcaauuguug

SEQ ID NO: 16039 - RNA, 25 nt, Artificial Sequence
  Synthetic Oligonucleotide
uucacagaagagggagcaaucgugg

SEQ ID NO: 16040 - RNA, 25 nt, Artificial Sequence
  Synthetic Oligonucleotide
uucacugaagagggagcaauuguug

SEQ ID NO: 16041 - RNA, 25 nt, Artificial Sequence
  Synthetic Oligonucleotide
uucaucgaagagggagcaauuguug

SEQ ID NO: 16042 - RNA, 25 nt, Artificial Sequence
  Synthetic Oligonucleotide
uuuaccgaagagggagcaauuguug

SEQ ID NO: 16043 - RNA, 25 nt, Artificial Sequence
  Synthetic Oligonucleotide
aucaccgaagagggagcaauuguug

SEQ ID NO: 16044 - RNA, 25 nt, Artificial Sequence
  Synthetic Oligonucleotide
cucaccgaagagggagcaauuguug

SEQ ID NO: 16045 - RNA, 25 nt, Artificial Sequence
  Synthetic Oligonucleotide
uucaccgaagagggacgaauuguug

SEQ ID NO: 16046 - RNA, 25 nt, Artificial Sequence
  Synthetic Oligonucleotide
uucaccgaagaggggacaauuguug

SEQ ID NO: 16047 - RNA, 25 nt, Artificial Sequence
  Synthetic Oligonucleotide
uucacagaagaaggagcaaucguug

SEQ ID NO: 16048 - RNA, 25 nt, Artificial Sequence
  Synthetic Oligonucleotide
uucacagaagaaggagcaaucguag

SEQ ID NO: 16049 - RNA, 25 nt, Artificial Sequence
  Synthetic Oligonucleotide
uucacagaagaaggagcaaucgugg

SEQ ID NO: 16050 - RNA, 25 nt, Artificial Sequence
  Synthetic Oligonucleotide
uucacagaagggggagcaaucgugg

SEQ ID NO: 16051 - RNA, 25 nt, Artificial Sequence
  Synthetic Oligonucleotide
uucacugaagaaggagcaaucaucg

SEQ ID NO: 16052 - RNA, 25 nt, Artificial Sequence
  Synthetic Oligonucleotide
uucacugaggagggagcaaucguug

SEQ ID NO: 16053 - RNA, 25 nt, Artificial Sequence
  Synthetic Oligonucleotide
uucacagaagaaggggcaaucgugg

SEQ ID NO: 16054 - RNA, 25 nt, Artificial Sequence
  Synthetic Oligonucleotide
uucacagaaggaggagcaaucgugg

SEQ ID NO: 16055 - RNA, 25 nt, Artificial Sequence
  Synthetic Oligonucleotide
uucacggaagaaggggcaauuguag

SEQ ID NO: 16056 - RNA, 25 nt, Artificial Sequence
  Synthetic Oligonucleotide
cgaagagggagcaauuguuggcgag

SEQ ID NO: 16057 - RNA, 25 nt, Artificial Sequence
  Synthetic Oligonucleotide
cgaagagggagcaauuguuggcgga

SEQ ID NO: 16058 - RNA, 25 nt, Artificial Sequence
  Synthetic Oligonucleotide
cgaagagggagcaauuguuggugaa

SEQ ID NO: 16059 - RNA, 25 nt, Artificial Sequence
  Synthetic Oligonucleotide
cgaagagggagcaauuguugccgaa

SEQ ID NO: 16060 - RNA, 25 nt, Artificial Sequence
  Synthetic Oligonucleotide
cgaagagggagcaauuguaggcgaa

SEQ ID NO: 16061 - RNA, 25 nt, Artificial Sequence
  Synthetic Oligonucleotide
cgaagagggagcaauugugggcgaa

SEQ ID NO: 16062 - RNA, 25 nt, Artificial Sequence
  Synthetic Oligonucleotide
cgaagagggagcaauugcuggcgaa

SEQ ID NO: 16063 - RNA, 25 nt, Artificial Sequence
  Synthetic Oligonucleotide
cgaagagggagcaauuauuggcgaa

SEQ ID NO: 16064 - RNA, 25 nt, Artificial Sequence
  Synthetic Oligonucleotide
cgaagagggagcaaucguuggagaa

SEQ ID NO: 16065 - RNA, 25 nt, Artificial Sequence
  Synthetic Oligonucleotide
cgaagagggagcaaucguuggagag

SEQ ID NO: 16066 - RNA, 25 nt, Artificial Sequence
  Synthetic Oligonucleotide
cgaagagggagcaguuguuggcgaa

SEQ ID NO: 16067 - RNA, 25 nt, Artificial Sequence
  Synthetic Oligonucleotide
cgaagagggaguaauuguuggcgaa

SEQ ID NO: 16068 - RNA, 25 nt, Artificial Sequence
  Synthetic Oligonucleotide
cgaagagggaacaauuguuggcgaa

SEQ ID NO: 16069 - RNA, 25 nt, Artificial Sequence
  Synthetic Oligonucleotide
cgaagagggaacaauuguuggugaa

SEQ ID NO: 16070 - RNA, 25 nt, Artificial Sequence
  Synthetic Oligonucleotide
cgaagagggcgcaauuguuggcgaa

SEQ ID NO: 16071 - RNA, 25 nt, Artificial Sequence
  Synthetic Oligonucleotide
cgaagagggggcaauuguuggcgaa

SEQ ID NO: 16072 - RNA, 25 nt, Artificial Sequence
  Synthetic Oligonucleotide
cgaagagggggcaauuguuggcgag

SEQ ID NO: 16073 - RNA, 25 nt, Artificial Sequence
  Synthetic Oligonucleotide
cgaagagggugcaauuguuggcgaa

SEQ ID NO: 16074 - RNA, 25 nt, Artificial Sequence
  Synthetic Oligonucleotide
cgaagaggaagcaauuguuggcgaa

SEQ ID NO: 16075 - RNA, 25 nt, Artificial Sequence
  Synthetic Oligonucleotide
cgaagaaggagcaauuguuggcgaa

SEQ ID NO: 16076 - RNA, 25 nt, Artificial Sequence
  Synthetic Oligonucleotide
cgaagauggagcaauuguuggcgaa

SEQ ID NO: 16077 - RNA, 25 nt, Artificial Sequence
  Synthetic Oligonucleotide
cgaagcgggagcaauuguuggcgaa

SEQ ID NO: 16078 - RNA, 25 nt, Artificial Sequence
  Synthetic Oligonucleotide
cgaaaagggagcaauuguuggcgaa

SEQ ID NO: 16079 - RNA, 25 nt, Artificial Sequence
  Synthetic Oligonucleotide
cgaggagggagcaauuguuggcgaa

SEQ ID NO: 16080 - RNA, 25 nt, Artificial Sequence
  Synthetic Oligonucleotide
caaagagggagcaauuguuggcgaa

SEQ ID NO: 16081 - RNA, 25 nt, Artificial Sequence
  Synthetic Oligonucleotide
agaagagggagcaauuguuggcgaa

SEQ ID NO: 16082 - RNA, 25 nt, Artificial Sequence
  Synthetic Oligonucleotide
ugaagagggagcaauuguuggcgaa

SEQ ID NO: 16083 - RNA, 25 nt, Artificial Sequence
  Synthetic Oligonucleotide
cgaagagggacgaauuguuggcgaa

SEQ ID NO: 16084 - RNA, 25 nt, Artificial Sequence
  Synthetic Oligonucleotide
cgaagaggggacaauuguuggcgaa

SEQ ID NO: 16085 - RNA, 25 nt, Artificial Sequence
  Synthetic Oligonucleotide
cgaggagggagcaauugucggagaa

SEQ ID NO: 16086 - RNA, 25 nt, Artificial Sequence
  Synthetic Oligonucleotide
agaagagggagcaaucgugggagaa

SEQ ID NO: 16087 - RNA, 25 nt, Artificial Sequence
  Synthetic Oligonucleotide
agaagaaggagcaaucguuggagaa

SEQ ID NO: 16088 - RNA, 25 nt, Artificial Sequence
  Synthetic Oligonucleotide
ugaggagggagcaaucguuggagaa

SEQ ID NO: 16089 - RNA, 25 nt, Artificial Sequence
  Synthetic Oligonucleotide
uacuaagggcuuucaccgaagagga

SEQ ID NO: 16090 - RNA, 25 nt, Artificial Sequence
  Synthetic Oligonucleotide
uacuaagggcuuucaccgaagaagg

SEQ ID NO: 16091 - RNA, 25 nt, Artificial Sequence
  Synthetic Oligonucleotide
uacuaagggcuuucaccgaagaugg

SEQ ID NO: 16092 - RNA, 25 nt, Artificial Sequence
  Synthetic Oligonucleotide
uacuaagggcuuucaccgaagcggg

SEQ ID NO: 16093 - RNA, 25 nt, Artificial Sequence
  Synthetic Oligonucleotide
uacuaagggcuuucaccgaaaaggg

SEQ ID NO: 16094 - RNA, 25 nt, Artificial Sequence
  Synthetic Oligonucleotide
uacuaagggcuuucaccaaagaggg

SEQ ID NO: 16095 - RNA, 25 nt, Artificial Sequence
  Synthetic Oligonucleotide
uacuaagggcuuucacagaagaggg

SEQ ID NO: 16096 - RNA, 25 nt, Artificial Sequence
  Synthetic Oligonucleotide
uacuaagggcuuucacugaagaggg

SEQ ID NO: 16097 - RNA, 25 nt, Artificial Sequence
  Synthetic Oligonucleotide
uacuaagggcuuucacugaggaggg

SEQ ID NO: 16098 - RNA, 25 nt, Artificial Sequence
  Synthetic Oligonucleotide
uacuaagggcuuucaucgaagaggg

SEQ ID NO: 16099 - RNA, 25 nt, Artificial Sequence
  Synthetic Oligonucleotide
uacuaagggcuuuuaccgaagaggg

SEQ ID NO: 16100 - RNA, 25 nt, Artificial Sequence
  Synthetic Oligonucleotide
uacuaagggcuaucaccgaagaggg

SEQ ID NO: 16101 - RNA, 25 nt, Artificial Sequence
  Synthetic Oligonucleotide
uacuaagggcucucaccgaagaggg

SEQ ID NO: 16102 - RNA, 25 nt, Artificial Sequence
  Synthetic Oligonucleotide
uacuaagggccuucaccgaagaggg

SEQ ID NO: 16103 - RNA, 25 nt, Artificial Sequence
  Synthetic Oligonucleotide
uacuaagggccuucaccgaggaggg

SEQ ID NO: 16104 - RNA, 25 nt, Artificial Sequence
  Synthetic Oligonucleotide
uacuaagggguuucaccgaagaggg

SEQ ID NO: 16105 - RNA, 25 nt, Artificial Sequence
  Synthetic Oligonucleotide
uacuaagagcuuucaccgaagaggg

SEQ ID NO: 16106 - RNA, 25 nt, Artificial Sequence
  Synthetic Oligonucleotide
uacuaaaggcuuucaccgaagaggg

SEQ ID NO: 16107 - RNA, 25 nt, Artificial Sequence
  Synthetic Oligonucleotide
uacugagggcuuucaccgaagaggg

SEQ ID NO: 16108 - RNA, 25 nt, Artificial Sequence
  Synthetic Oligonucleotide
uacuuagggcuuucaccgaagaggg

SEQ ID NO: 16109 - RNA, 25 nt, Artificial Sequence
  Synthetic Oligonucleotide
uacaaagggcuuucaccgaagaggg

SEQ ID NO: 16110 - RNA, 25 nt, Artificial Sequence
  Synthetic Oligonucleotide
uauuaagggcuuucaccgaagaggg

SEQ ID NO: 16111 - RNA, 25 nt, Artificial Sequence
  Synthetic Oligonucleotide
ugcuaagggcuuucaccgaagaggg

SEQ ID NO: 16112 - RNA, 25 nt, Artificial Sequence
  Synthetic Oligonucleotide
ugcuaagggcuuucaccgaggaggg

SEQ ID NO: 16113 - RNA, 25 nt, Artificial Sequence
  Synthetic Oligonucleotide
cacuaagggcuuucaccgaagaggg

SEQ ID NO: 16114 - RNA, 25 nt, Artificial Sequence
  Synthetic Oligonucleotide
uacucagagcuuucacugaagaagg

SEQ ID NO: 16115 - RNA, 25 nt, Artificial Sequence
  Synthetic Oligonucleotide
uacuuagagcuuucacagaagaggg

SEQ ID NO: 16116 - RNA, 25 nt, Artificial Sequence
  Synthetic Oligonucleotide
uacuuagagcuuucacagaagaagg

SEQ ID NO: 16117 - RNA, 25 nt, Artificial Sequence
  Synthetic Oligonucleotide
uacuuagagcuuucacagaaggggg

SEQ ID NO: 16118 - RNA, 25 nt, Artificial Sequence
  Synthetic Oligonucleotide
uacuuagagcuuucacagaaggagg

SEQ ID NO: 16119 - RNA, 25 nt, Artificial Sequence
  Synthetic Oligonucleotide
gcuuucaccgaagagggagcaauua

SEQ ID NO: 16120 - RNA, 25 nt, Artificial Sequence
  Synthetic Oligonucleotide
gcuuucaccgaagagggagcaaucg

SEQ ID NO: 16121 - RNA, 25 nt, Artificial Sequence
  Synthetic Oligonucleotide
gcuuucaccgaagagggagcaguug

SEQ ID NO: 16122 - RNA, 25 nt, Artificial Sequence
  Synthetic Oligonucleotide
gcuuucaccgaagagggaguaauug

SEQ ID NO: 16123 - RNA, 25 nt, Artificial Sequence
  Synthetic Oligonucleotide
gcuuucaccgaagagggaacaauug

SEQ ID NO: 16124 - RNA, 25 nt, Artificial Sequence
  Synthetic Oligonucleotide
gcuuucaccgaagagggacgaauug

SEQ ID NO: 16125 - RNA, 25 nt, Artificial Sequence
  Synthetic Oligonucleotide
gcuuucaccgaagagggcgcaauug

SEQ ID NO: 16126 - RNA, 25 nt, Artificial Sequence
  Synthetic Oligonucleotide
gcuuucaccgaagagggggcaauug

SEQ ID NO: 16127 - RNA, 25 nt, Artificial Sequence
  Synthetic Oligonucleotide
gcuuucaccgaagagggugcaauug

SEQ ID NO: 16128 - RNA, 25 nt, Artificial Sequence
  Synthetic Oligonucleotide
gcuuucaccgaagaggaagcaauug

SEQ ID NO: 16129 - RNA, 25 nt, Artificial Sequence
  Synthetic Oligonucleotide
gcuuucaccgaagaaggagcaauug

SEQ ID NO: 16130 - RNA, 25 nt, Artificial Sequence
  Synthetic Oligonucleotide
gcuuucaccgaagauggagcaauug

SEQ ID NO: 16131 - RNA, 25 nt, Artificial Sequence
  Synthetic Oligonucleotide
gcuuucaccgaagcgggagcaauug

SEQ ID NO: 16132 - RNA, 25 nt, Artificial Sequence
  Synthetic Oligonucleotide
gcuuucaccgaaaagggagcaauug

SEQ ID NO: 16133 - RNA, 25 nt, Artificial Sequence
  Synthetic Oligonucleotide
gcuuucaccgaggagggagcaauug

SEQ ID NO: 16134 - RNA, 25 nt, Artificial Sequence
  Synthetic Oligonucleotide
gcuuucaccaaagagggagcaauug

SEQ ID NO: 16135 - RNA, 25 nt, Artificial Sequence
  Synthetic Oligonucleotide
gcuuucacagaagagggagcaauug

SEQ ID NO: 16136 - RNA, 25 nt, Artificial Sequence
  Synthetic Oligonucleotide
gcuuucacagaagagggagcaaucg

SEQ ID NO: 16137 - RNA, 25 nt, Artificial Sequence
  Synthetic Oligonucleotide
gcuuucacugaagagggagcaauug

SEQ ID NO: 16138 - RNA, 25 nt, Artificial Sequence
  Synthetic Oligonucleotide
gcuuucaucgaagagggagcaauug

SEQ ID NO: 16139 - RNA, 25 nt, Artificial Sequence
  Synthetic Oligonucleotide
gcuuuuaccgaagagggagcaauug

SEQ ID NO: 16140 - RNA, 25 nt, Artificial Sequence
  Synthetic Oligonucleotide
gcuaucaccgaagagggagcaauug

SEQ ID NO: 16141 - RNA, 25 nt, Artificial Sequence
  Synthetic Oligonucleotide
gcucucaccgaagagggagcaauug

SEQ ID NO: 16142 - RNA, 25 nt, Artificial Sequence
  Synthetic Oligonucleotide
gccuucaccgaagagggagcaauug

SEQ ID NO: 16143 - RNA, 25 nt, Artificial Sequence
  Synthetic Oligonucleotide
gguuucaccgaagagggagcaauug

SEQ ID NO: 16144 - RNA, 25 nt, Artificial Sequence
  Synthetic Oligonucleotide
gcuuucacagaagaaggagcaaucg

SEQ ID NO: 16145 - RNA, 25 nt, Artificial Sequence
  Synthetic Oligonucleotide
gcuuucacagaagggggagcaaucg

SEQ ID NO: 16146 - RNA, 25 nt, Artificial Sequence
  Synthetic Oligonucleotide
gcuuucacugaagaaggagcaauca

SEQ ID NO: 16147 - RNA, 25 nt, Artificial Sequence
  Synthetic Oligonucleotide
gcuuucacugaggagggagcaaucg

SEQ ID NO: 16148 - RNA, 25 nt, Artificial Sequence
  Synthetic Oligonucleotide
gccuucaccgaagagggaacaauug

SEQ ID NO: 16149 - RNA, 25 nt, Artificial Sequence
  Synthetic Oligonucleotide
gccuucaccgaggagggagcaauug

SEQ ID NO: 16150 - RNA, 25 nt, Artificial Sequence
  Synthetic Oligonucleotide
gcuuucacagaagaaggggcaaucg

SEQ ID NO: 16151 - RNA, 25 nt, Artificial Sequence
  Synthetic Oligonucleotide
gcuuucacagaaggaggagcaaucg

SEQ ID NO: 16152 - RNA, 25 nt, Artificial Sequence
  Synthetic Oligonucleotide
gcuuucacggaagaaggggcaauug

SEQ ID NO: 16153 - RNA, 25 nt, Artificial Sequence
  Synthetic Oligonucleotide
gccuucaccgaagaggggacaauug

SEQ ID NO: 16154 - RNA, 25 nt, Artificial Sequence
  Synthetic Oligonucleotide
cuuucaccgaagagggagcaauugc

SEQ ID NO: 16155 - RNA, 25 nt, Artificial Sequence
  Synthetic Oligonucleotide
cuuucaccgaagagggagcaauuau

SEQ ID NO: 16156 - RNA, 25 nt, Artificial Sequence
  Synthetic Oligonucleotide
cuuucaccgaagagggagcaaucgu

SEQ ID NO: 16157 - RNA, 25 nt, Artificial Sequence
  Synthetic Oligonucleotide
cuuucaccgaagagggagcaguugu

SEQ ID NO: 16158 - RNA, 25 nt, Artificial Sequence
  Synthetic Oligonucleotide
cuuucaccgaagagggaguaauugu

SEQ ID NO: 16159 - RNA, 25 nt, Artificial Sequence
  Synthetic Oligonucleotide
cuuucaccgaagagggaacaauugu

SEQ ID NO: 16160 - RNA, 25 nt, Artificial Sequence
  Synthetic Oligonucleotide
cuuucaccgaagagggcgcaauugu

SEQ ID NO: 16161 - RNA, 25 nt, Artificial Sequence
  Synthetic Oligonucleotide
cuuucaccgaagagggggcaauugu

SEQ ID NO: 16162 - RNA, 25 nt, Artificial Sequence
  Synthetic Oligonucleotide
cuuucaccgaagagggugcaauugu

SEQ ID NO: 16163 - RNA, 25 nt, Artificial Sequence
  Synthetic Oligonucleotide
cuuucaccgaagaggaagcaauugu

SEQ ID NO: 16164 - RNA, 25 nt, Artificial Sequence
  Synthetic Oligonucleotide
cuuucaccgaagaaggagcaauugu

SEQ ID NO: 16165 - RNA, 25 nt, Artificial Sequence
  Synthetic Oligonucleotide
cuuucaccgaagauggagcaauugu

SEQ ID NO: 16166 - RNA, 25 nt, Artificial Sequence
  Synthetic Oligonucleotide
cuuucaccgaagcgggagcaauugu

SEQ ID NO: 16167 - RNA, 25 nt, Artificial Sequence
  Synthetic Oligonucleotide
cuuucaccgaaaagggagcaauugu

SEQ ID NO: 16168 - RNA, 25 nt, Artificial Sequence
  Synthetic Oligonucleotide
cuuucaccgaggagggagcaauugu

SEQ ID NO: 16169 - RNA, 25 nt, Artificial Sequence
  Synthetic Oligonucleotide
cuuucaccaaagagggagcaauugu

SEQ ID NO: 16170 - RNA, 25 nt, Artificial Sequence
  Synthetic Oligonucleotide
cuuucacagaagagggagcaauugu

SEQ ID NO: 16171 - RNA, 25 nt, Artificial Sequence
  Synthetic Oligonucleotide
cuuucacagaagagggagcaaucgu

SEQ ID NO: 16172 - RNA, 25 nt, Artificial Sequence
  Synthetic Oligonucleotide
cuuucacugaagagggagcaauugu

SEQ ID NO: 16173 - RNA, 25 nt, Artificial Sequence
  Synthetic Oligonucleotide
cuuucaucgaagagggagcaauugu

SEQ ID NO: 16174 - RNA, 25 nt, Artificial Sequence
  Synthetic Oligonucleotide
cuuuuaccgaagagggagcaauugu

SEQ ID NO: 16175 - RNA, 25 nt, Artificial Sequence
  Synthetic Oligonucleotide
cuaucaccgaagagggagcaauugu

SEQ ID NO: 16176 - RNA, 25 nt, Artificial Sequence
  Synthetic Oligonucleotide
cucucaccgaagagggagcaauugu

SEQ ID NO: 16177 - RNA, 25 nt, Artificial Sequence
  Synthetic Oligonucleotide
ccuucaccgaagagggagcaauugu

SEQ ID NO: 16178 - RNA, 25 nt, Artificial Sequence
  Synthetic Oligonucleotide
guuucaccgaagagggagcaauugu

SEQ ID NO: 16179 - RNA, 25 nt, Artificial Sequence
  Synthetic Oligonucleotide
cuuucaccgaagagggacgaauugu

SEQ ID NO: 16180 - RNA, 25 nt, Artificial Sequence
  Synthetic Oligonucleotide
cuuucacagaagaaggagcaaucgu

SEQ ID NO: 16181 - RNA, 25 nt, Artificial Sequence
  Synthetic Oligonucleotide
cuuucacagaagggggagcaaucgu

SEQ ID NO: 16182 - RNA, 25 nt, Artificial Sequence
  Synthetic Oligonucleotide
cuuucacugaagaaggagcaaucau

SEQ ID NO: 16183 - RNA, 25 nt, Artificial Sequence
  Synthetic Oligonucleotide
cuuucacugaggagggagcaaucgu

SEQ ID NO: 16184 - RNA, 25 nt, Artificial Sequence
  Synthetic Oligonucleotide
ccuucaccgaagagggaacaauugu

SEQ ID NO: 16185 - RNA, 25 nt, Artificial Sequence
  Synthetic Oligonucleotide
ccuucaccgaggagggagcaauugu

SEQ ID NO: 16186 - RNA, 25 nt, Artificial Sequence
  Synthetic Oligonucleotide
cuuucacagaagaaggggcaaucgu

SEQ ID NO: 16187 - RNA, 25 nt, Artificial Sequence
  Synthetic Oligonucleotide
cuuucacagaaggaggagcaaucgu

SEQ ID NO: 16188 - RNA, 25 nt, Artificial Sequence
  Synthetic Oligonucleotide
cuuucacggaagaaggggcaauugu

SEQ ID NO: 16189 - RNA, 25 nt, Artificial Sequence
  Synthetic Oligonucleotide
ccuucaccgaagaggggacaauugu

SEQ ID NO: 16190 - RNA, 25 nt, Artificial Sequence
  Synthetic Oligonucleotide
cuaagggcuuucaccgaagagggaa

SEQ ID NO: 16191 - RNA, 25 nt, Artificial Sequence
  Synthetic Oligonucleotide
cuaagggcuuucaccgaagagggac

SEQ ID NO: 16192 - RNA, 25 nt, Artificial Sequence
  Synthetic Oligonucleotide
cuaagggcuuucaccgaagagggcg

SEQ ID NO: 16193 - RNA, 25 nt, Artificial Sequence
  Synthetic Oligonucleotide
cuaagggcuuucaccgaagaggggg

SEQ ID NO: 16194 - RNA, 25 nt, Artificial Sequence
  Synthetic Oligonucleotide
cuaagggcuuucaccgaagagggug

SEQ ID NO: 16195 - RNA, 25 nt, Artificial Sequence
  Synthetic Oligonucleotide
cuaagggcuuucaccgaagaggaag

SEQ ID NO: 16196 - RNA, 25 nt, Artificial Sequence
  Synthetic Oligonucleotide
cuaagggcuuucaccgaagaaggag

SEQ ID NO: 16197 - RNA, 25 nt, Artificial Sequence
  Synthetic Oligonucleotide
cuaagggcuuucaccgaagauggag

SEQ ID NO: 16198 - RNA, 25 nt, Artificial Sequence
  Synthetic Oligonucleotide
cuaagggcuuucaccgaagcgggag

SEQ ID NO: 16199 - RNA, 25 nt, Artificial Sequence
  Synthetic Oligonucleotide
cuaagggcuuucaccgaaaagggag

SEQ ID NO: 16200 - RNA, 25 nt, Artificial Sequence
  Synthetic Oligonucleotide
cuaagggcuuucaccgaggagggag

SEQ ID NO: 16201 - RNA, 25 nt, Artificial Sequence
  Synthetic Oligonucleotide
cuaagggcuuucaccaaagagggag

SEQ ID NO: 16202 - RNA, 25 nt, Artificial Sequence
  Synthetic Oligonucleotide
cuaagggcuuucacagaagagggag

SEQ ID NO: 16203 - RNA, 25 nt, Artificial Sequence
  Synthetic Oligonucleotide
cuaagggcuuucacugaagagggag

SEQ ID NO: 16204 - RNA, 25 nt, Artificial Sequence
  Synthetic Oligonucleotide
cuaagggcuuucaucgaagagggag

SEQ ID NO: 16205 - RNA, 25 nt, Artificial Sequence
  Synthetic Oligonucleotide
cuaagggcuuuuaccgaagagggag

SEQ ID NO: 16206 - RNA, 25 nt, Artificial Sequence
  Synthetic Oligonucleotide
cuaagggcuaucaccgaagagggag

SEQ ID NO: 16207 - RNA, 25 nt, Artificial Sequence
  Synthetic Oligonucleotide
cuaagggcucucaccgaagagggag

SEQ ID NO: 16208 - RNA, 25 nt, Artificial Sequence
  Synthetic Oligonucleotide
cuaagggccuucaccgaagagggag

SEQ ID NO: 16209 - RNA, 25 nt, Artificial Sequence
  Synthetic Oligonucleotide
cuaagggccuucaccgaagagggaa

SEQ ID NO: 16210 - RNA, 25 nt, Artificial Sequence
  Synthetic Oligonucleotide
cuaagggccuucaccgaagagggga

SEQ ID NO: 16211 - RNA, 25 nt, Artificial Sequence
  Synthetic Oligonucleotide
cuaagggguuucaccgaagagggag

SEQ ID NO: 16212 - RNA, 25 nt, Artificial Sequence
  Synthetic Oligonucleotide
cuaagagcuuucaccgaagagggag

SEQ ID NO: 16213 - RNA, 25 nt, Artificial Sequence
  Synthetic Oligonucleotide
cuaaaggcuuucaccgaagagggag

SEQ ID NO: 16214 - RNA, 25 nt, Artificial Sequence
  Synthetic Oligonucleotide
cugagggcuuucaccgaagagggag

SEQ ID NO: 16215 - RNA, 25 nt, Artificial Sequence
  Synthetic Oligonucleotide
cuuagggcuuucaccgaagagggag

SEQ ID NO: 16216 - RNA, 25 nt, Artificial Sequence
  Synthetic Oligonucleotide
caaagggcuuucaccgaagagggag

SEQ ID NO: 16217 - RNA, 25 nt, Artificial Sequence
  Synthetic Oligonucleotide
uuaagggcuuucaccgaagagggag

SEQ ID NO: 16218 - RNA, 25 nt, Artificial Sequence
  Synthetic Oligonucleotide
cuaagggcuuucacugaggagggag

SEQ ID NO: 16219 - RNA, 25 nt, Artificial Sequence
  Synthetic Oligonucleotide
cuaagggccuucaccgaggagggag

SEQ ID NO: 16220 - RNA, 25 nt, Artificial Sequence
  Synthetic Oligonucleotide
cucagagcuuucacugaagaaggag

SEQ ID NO: 16221 - RNA, 25 nt, Artificial Sequence
  Synthetic Oligonucleotide
cuuagagcuuucacagaagagggag

SEQ ID NO: 16222 - RNA, 25 nt, Artificial Sequence
  Synthetic Oligonucleotide
cuuagagcuuucacagaagaaggag

SEQ ID NO: 16223 - RNA, 25 nt, Artificial Sequence
  Synthetic Oligonucleotide
cuuagagcuuucacagaagaagggg

SEQ ID NO: 16224 - RNA, 25 nt, Artificial Sequence
  Synthetic Oligonucleotide
cuuagagcuuucacagaagggggag

SEQ ID NO: 16225 - RNA, 25 nt, Artificial Sequence
  Synthetic Oligonucleotide
cuuagagcuuucacagaaggaggag

SEQ ID NO: 16226 - RNA, 25 nt, Artificial Sequence
  Synthetic Oligonucleotide
cuuagagcuuucacggaagaagggg

SEQ ID NO: 16227 - RNA, 25 nt, Artificial Sequence
  Synthetic Oligonucleotide
ggcuuucaccgaagagggagcaauc

SEQ ID NO: 16228 - RNA, 25 nt, Artificial Sequence
  Synthetic Oligonucleotide
ggcuuucaccgaagagggagcaguu

SEQ ID NO: 16229 - RNA, 25 nt, Artificial Sequence
  Synthetic Oligonucleotide
ggcuuucaccgaagagggaguaauu

SEQ ID NO: 16230 - RNA, 25 nt, Artificial Sequence
  Synthetic Oligonucleotide
ggcuuucaccgaagagggaacaauu

SEQ ID NO: 16231 - RNA, 25 nt, Artificial Sequence
  Synthetic Oligonucleotide
ggcuuucaccgaagagggacgaauu

SEQ ID NO: 16232 - RNA, 25 nt, Artificial Sequence
  Synthetic Oligonucleotide
ggcuuucaccgaagagggcgcaauu

SEQ ID NO: 16233 - RNA, 25 nt, Artificial Sequence
  Synthetic Oligonucleotide
ggcuuucaccgaagagggggcaauu

SEQ ID NO: 16234 - RNA, 25 nt, Artificial Sequence
  Synthetic Oligonucleotide
ggcuuucaccgaagagggugcaauu

SEQ ID NO: 16235 - RNA, 25 nt, Artificial Sequence
  Synthetic Oligonucleotide
ggcuuucaccgaagaggaagcaauu

SEQ ID NO: 16236 - RNA, 25 nt, Artificial Sequence
  Synthetic Oligonucleotide
ggcuuucaccgaagaaggagcaauu

SEQ ID NO: 16237 - RNA, 25 nt, Artificial Sequence
  Synthetic Oligonucleotide
ggcuuucaccgaagauggagcaauu

SEQ ID NO: 16238 - RNA, 25 nt, Artificial Sequence
  Synthetic Oligonucleotide
ggcuuucaccgaagcgggagcaauu

SEQ ID NO: 16239 - RNA, 25 nt, Artificial Sequence
  Synthetic Oligonucleotide
ggcuuucaccgaaaagggagcaauu

SEQ ID NO: 16240 - RNA, 25 nt, Artificial Sequence
  Synthetic Oligonucleotide
ggcuuucaccgaggagggagcaauu

SEQ ID NO: 16241 - RNA, 25 nt, Artificial Sequence
  Synthetic Oligonucleotide
ggcuuucaccaaagagggagcaauu

SEQ ID NO: 16242 - RNA, 25 nt, Artificial Sequence
  Synthetic Oligonucleotide
ggcuuucacagaagagggagcaauu

SEQ ID NO: 16243 - RNA, 25 nt, Artificial Sequence
  Synthetic Oligonucleotide
ggcuuucacugaagagggagcaauu

SEQ ID NO: 16244 - RNA, 25 nt, Artificial Sequence
  Synthetic Oligonucleotide
ggcuuucaucgaagagggagcaauu

SEQ ID NO: 16245 - RNA, 25 nt, Artificial Sequence
  Synthetic Oligonucleotide
ggcuuuuaccgaagagggagcaauu

SEQ ID NO: 16246 - RNA, 25 nt, Artificial Sequence
  Synthetic Oligonucleotide
ggcuaucaccgaagagggagcaauu

SEQ ID NO: 16247 - RNA, 25 nt, Artificial Sequence
  Synthetic Oligonucleotide
ggcucucaccgaagagggagcaauu

SEQ ID NO: 16248 - RNA, 25 nt, Artificial Sequence
  Synthetic Oligonucleotide
ggccuucaccgaagagggagcaauu

SEQ ID NO: 16249 - RNA, 25 nt, Artificial Sequence
  Synthetic Oligonucleotide
ggccuucaccgaagagggaacaauu

SEQ ID NO: 16250 - RNA, 25 nt, Artificial Sequence
  Synthetic Oligonucleotide
ggguuucaccgaagagggagcaauu

SEQ ID NO: 16251 - RNA, 25 nt, Artificial Sequence
  Synthetic Oligonucleotide
agcuuucaccgaagagggagcaauu

SEQ ID NO: 16252 - RNA, 25 nt, Artificial Sequence
  Synthetic Oligonucleotide
ggcuuucacugaggagggagcaauc

SEQ ID NO: 16253 - RNA, 25 nt, Artificial Sequence
  Synthetic Oligonucleotide
ggccuucaccgaagaggggacaauu

SEQ ID NO: 16254 - RNA, 25 nt, Artificial Sequence
  Synthetic Oligonucleotide
ggccuucaccgaggagggagcaauu

SEQ ID NO: 16255 - RNA, 25 nt, Artificial Sequence
  Synthetic Oligonucleotide
agcuuucacagaagagggagcaauc

SEQ ID NO: 16256 - RNA, 25 nt, Artificial Sequence
  Synthetic Oligonucleotide
agcuuucacagaagaaggagcaauc

SEQ ID NO: 16257 - RNA, 25 nt, Artificial Sequence
  Synthetic Oligonucleotide
agcuuucacagaagggggagcaauc

SEQ ID NO: 16258 - RNA, 25 nt, Artificial Sequence
  Synthetic Oligonucleotide
agcuuucacugaagaaggagcaauc

SEQ ID NO: 16259 - RNA, 25 nt, Artificial Sequence
  Synthetic Oligonucleotide
uuucaccgaagagggagcaauugua

SEQ ID NO: 16260 - RNA, 25 nt, Artificial Sequence
  Synthetic Oligonucleotide
uuucaccgaagagggagcaauugug

SEQ ID NO: 16261 - RNA, 25 nt, Artificial Sequence
  Synthetic Oligonucleotide
uuucaccgaagagggagcaauugcu

SEQ ID NO: 16262 - RNA, 25 nt, Artificial Sequence
  Synthetic Oligonucleotide
uuucaccgaagagggagcaauuauu

SEQ ID NO: 16263 - RNA, 25 nt, Artificial Sequence
  Synthetic Oligonucleotide
uuucaccgaagagggagcaaucguu

SEQ ID NO: 16264 - RNA, 25 nt, Artificial Sequence
  Synthetic Oligonucleotide
uuucaccgaagagggagcaguuguu

SEQ ID NO: 16265 - RNA, 25 nt, Artificial Sequence
  Synthetic Oligonucleotide
uuucaccgaagagggaguaauuguu

SEQ ID NO: 16266 - RNA, 25 nt, Artificial Sequence
  Synthetic Oligonucleotide
uuucaccgaagagggaacaauuguu

SEQ ID NO: 16267 - RNA, 25 nt, Artificial Sequence
  Synthetic Oligonucleotide
uuucaccgaagagggcgcaauuguu

SEQ ID NO: 16268 - RNA, 25 nt, Artificial Sequence
  Synthetic Oligonucleotide
uuucaccgaagagggggcaauuguu

SEQ ID NO: 16269 - RNA, 25 nt, Artificial Sequence
  Synthetic Oligonucleotide
uuucaccgaagagggugcaauuguu

SEQ ID NO: 16270 - RNA, 25 nt, Artificial Sequence
  Synthetic Oligonucleotide
uuucaccgaagaggaagcaauuguu

SEQ ID NO: 16271 - RNA, 25 nt, Artificial Sequence
  Synthetic Oligonucleotide
uuucaccgaagaaggagcaauuguu

SEQ ID NO: 16272 - RNA, 25 nt, Artificial Sequence
  Synthetic Oligonucleotide
uuucaccgaagauggagcaauuguu

SEQ ID NO: 16273 - RNA, 25 nt, Artificial Sequence
  Synthetic Oligonucleotide
uuucaccgaagcgggagcaauuguu

SEQ ID NO: 16274 - RNA, 25 nt, Artificial Sequence
  Synthetic Oligonucleotide
uuucaccgaaaagggagcaauuguu

SEQ ID NO: 16275 - RNA, 25 nt, Artificial Sequence
  Synthetic Oligonucleotide
uuucaccgaggagggagcaauuguu

SEQ ID NO: 16276 - RNA, 25 nt, Artificial Sequence
  Synthetic Oligonucleotide
uuucaccaaagagggagcaauuguu

SEQ ID NO: 16277 - RNA, 25 nt, Artificial Sequence
  Synthetic Oligonucleotide
uuucacagaagagggagcaauuguu

SEQ ID NO: 16278 - RNA, 25 nt, Artificial Sequence
  Synthetic Oligonucleotide
uuucacagaagagggagcaaucgug

SEQ ID NO: 16279 - RNA, 25 nt, Artificial Sequence
  Synthetic Oligonucleotide
uuucacugaagagggagcaauuguu

SEQ ID NO: 16280 - RNA, 25 nt, Artificial Sequence
  Synthetic Oligonucleotide
uuucaucgaagagggagcaauuguu

SEQ ID NO: 16281 - RNA, 25 nt, Artificial Sequence
  Synthetic Oligonucleotide
uuuuaccgaagagggagcaauuguu

SEQ ID NO: 16282 - RNA, 25 nt, Artificial Sequence
  Synthetic Oligonucleotide
uaucaccgaagagggagcaauuguu

SEQ ID NO: 16283 - RNA, 25 nt, Artificial Sequence
  Synthetic Oligonucleotide
ucucaccgaagagggagcaauuguu

SEQ ID NO: 16284 - RNA, 25 nt, Artificial Sequence
  Synthetic Oligonucleotide
cuucaccgaagagggagcaauuguu

SEQ ID NO: 16285 - RNA, 25 nt, Artificial Sequence
  Synthetic Oligonucleotide
uuucaccgaagagggacgaauuguu

SEQ ID NO: 16286 - RNA, 25 nt, Artificial Sequence
  Synthetic Oligonucleotide
uuucacagaagaaggagcaaucguu

SEQ ID NO: 16287 - RNA, 25 nt, Artificial Sequence
  Synthetic Oligonucleotide
uuucacagaagaaggagcaaucgua

SEQ ID NO: 16288 - RNA, 25 nt, Artificial Sequence
  Synthetic Oligonucleotide
uuucacagaagaaggagcaaucgug

SEQ ID NO: 16289 - RNA, 25 nt, Artificial Sequence
  Synthetic Oligonucleotide
uuucacagaagggggagcaaucgug

SEQ ID NO: 16290 - RNA, 25 nt, Artificial Sequence
  Synthetic Oligonucleotide
uuucacugaagaaggagcaaucauc

SEQ ID NO: 16291 - RNA, 25 nt, Artificial Sequence
  Synthetic Oligonucleotide
uuucacugaggagggagcaaucguu

SEQ ID NO: 16292 - RNA, 25 nt, Artificial Sequence
  Synthetic Oligonucleotide
cuucaccgaagagggaacaauuguu

SEQ ID NO: 16293 - RNA, 25 nt, Artificial Sequence
  Synthetic Oligonucleotide
cuucaccgaggagggagcaauuguu

SEQ ID NO: 16294 - RNA, 25 nt, Artificial Sequence
  Synthetic Oligonucleotide
cuucaccgaggagggagcaauuguc

SEQ ID NO: 16295 - RNA, 25 nt, Artificial Sequence
  Synthetic Oligonucleotide
uuucacagaagaaggggcaaucgug

SEQ ID NO: 16296 - RNA, 25 nt, Artificial Sequence
  Synthetic Oligonucleotide
uuucacagaaggaggagcaaucgug

SEQ ID NO: 16297 - RNA, 25 nt, Artificial Sequence
  Synthetic Oligonucleotide
uuucacggaagaaggggcaauugua

SEQ ID NO: 16298 - RNA, 25 nt, Artificial Sequence
  Synthetic Oligonucleotide
cuucaccgaagaggggacaauuguu

SEQ ID NO: 16299 - RNA, 25 nt, Artificial Sequence
  Synthetic Oligonucleotide
aagggcuuucaccgaagagggagua

SEQ ID NO: 16300 - RNA, 25 nt, Artificial Sequence
  Synthetic Oligonucleotide
aagggcuuucaccgaagagggaaca

SEQ ID NO: 16301 - RNA, 25 nt, Artificial Sequence
  Synthetic Oligonucleotide
aagggcuuucaccgaagagggacga

SEQ ID NO: 16302 - RNA, 25 nt, Artificial Sequence
  Synthetic Oligonucleotide
aagggcuuucaccgaagagggcgca

SEQ ID NO: 16303 - RNA, 25 nt, Artificial Sequence
  Synthetic Oligonucleotide
aagggcuuucaccgaagagggggca

SEQ ID NO: 16304 - RNA, 25 nt, Artificial Sequence
  Synthetic Oligonucleotide
aagggcuuucaccgaagagggugca

SEQ ID NO: 16305 - RNA, 25 nt, Artificial Sequence
  Synthetic Oligonucleotide
aagggcuuucaccgaagaggaagca

SEQ ID NO: 16306 - RNA, 25 nt, Artificial Sequence
  Synthetic Oligonucleotide
aagggcuuucaccgaagaaggagca

SEQ ID NO: 16307 - RNA, 25 nt, Artificial Sequence
  Synthetic Oligonucleotide
aagggcuuucaccgaagauggagca

SEQ ID NO: 16308 - RNA, 25 nt, Artificial Sequence
  Synthetic Oligonucleotide
aagggcuuucaccgaagcgggagca

SEQ ID NO: 16309 - RNA, 25 nt, Artificial Sequence
  Synthetic Oligonucleotide
aagggcuuucaccgaaaagggagca

SEQ ID NO: 16310 - RNA, 25 nt, Artificial Sequence
  Synthetic Oligonucleotide
aagggcuuucaccgaggagggagca

SEQ ID NO: 16311 - RNA, 25 nt, Artificial Sequence
  Synthetic Oligonucleotide
aagggcuuucaccaaagagggagca

SEQ ID NO: 16312 - RNA, 25 nt, Artificial Sequence
  Synthetic Oligonucleotide
aagggcuuucacagaagagggagca

SEQ ID NO: 16313 - RNA, 25 nt, Artificial Sequence
  Synthetic Oligonucleotide
aagggcuuucacugaagagggagca

SEQ ID NO: 16314 - RNA, 25 nt, Artificial Sequence
  Synthetic Oligonucleotide
aagggcuuucaucgaagagggagca

SEQ ID NO: 16315 - RNA, 25 nt, Artificial Sequence
  Synthetic Oligonucleotide
aagggcuuuuaccgaagagggagca

SEQ ID NO: 16316 - RNA, 25 nt, Artificial Sequence
  Synthetic Oligonucleotide
aagggcuaucaccgaagagggagca

SEQ ID NO: 16317 - RNA, 25 nt, Artificial Sequence
  Synthetic Oligonucleotide
aagggcucucaccgaagagggagca

SEQ ID NO: 16318 - RNA, 25 nt, Artificial Sequence
  Synthetic Oligonucleotide
aagggccuucaccgaagagggagca

SEQ ID NO: 16319 - RNA, 25 nt, Artificial Sequence
  Synthetic Oligonucleotide
aagggccuucaccgaagagggaaca

SEQ ID NO: 16320 - RNA, 25 nt, Artificial Sequence
  Synthetic Oligonucleotide
aagggccuucaccgaagaggggaca

SEQ ID NO: 16321 - RNA, 25 nt, Artificial Sequence
  Synthetic Oligonucleotide
aagggguuucaccgaagagggagca

SEQ ID NO: 16322 - RNA, 25 nt, Artificial Sequence
  Synthetic Oligonucleotide
aagagcuuucaccgaagagggagca

SEQ ID NO: 16323 - RNA, 25 nt, Artificial Sequence
  Synthetic Oligonucleotide
aaaggcuuucaccgaagagggagca

SEQ ID NO: 16324 - RNA, 25 nt, Artificial Sequence
  Synthetic Oligonucleotide
gagggcuuucaccgaagagggagca

SEQ ID NO: 16325 - RNA, 25 nt, Artificial Sequence
  Synthetic Oligonucleotide
uagggcuuucaccgaagagggagca

SEQ ID NO: 16326 - RNA, 25 nt, Artificial Sequence
  Synthetic Oligonucleotide
aagggcuuucacugaggagggagca

SEQ ID NO: 16327 - RNA, 25 nt, Artificial Sequence
  Synthetic Oligonucleotide
aagggccuucaccgaggagggagca

SEQ ID NO: 16328 - RNA, 25 nt, Artificial Sequence
  Synthetic Oligonucleotide
uagagcuuucacagaagagggagca

SEQ ID NO: 16329 - RNA, 25 nt, Artificial Sequence
  Synthetic Oligonucleotide
uuacuaagggcuuucaccgaagaag

SEQ ID NO: 16330 - RNA, 25 nt, Artificial Sequence
  Synthetic Oligonucleotide
uuacuaagggcuuucaccgaagaug

SEQ ID NO: 16331 - RNA, 25 nt, Artificial Sequence
  Synthetic Oligonucleotide
uuacuaagggcuuucaccgaagcgg

SEQ ID NO: 16332 - RNA, 25 nt, Artificial Sequence
  Synthetic Oligonucleotide
uuacuaagggcuuucaccgaaaagg

SEQ ID NO: 16333 - RNA, 25 nt, Artificial Sequence
  Synthetic Oligonucleotide
uuacuaagggcuuucaccaaagagg

SEQ ID NO: 16334 - RNA, 25 nt, Artificial Sequence
  Synthetic Oligonucleotide
uuacuaagggcuuucacagaagagg

SEQ ID NO: 16335 - RNA, 25 nt, Artificial Sequence
  Synthetic Oligonucleotide
uuacuaagggcuuucacugaagagg

SEQ ID NO: 16336 - RNA, 25 nt, Artificial Sequence
  Synthetic Oligonucleotide
uuacuaagggcuuucaucgaagagg

SEQ ID NO: 16337 - RNA, 25 nt, Artificial Sequence
  Synthetic Oligonucleotide
uuacuaagggcuuuuaccgaagagg

SEQ ID NO: 16338 - RNA, 25 nt, Artificial Sequence
  Synthetic Oligonucleotide
uuacuaagggcuaucaccgaagagg

SEQ ID NO: 16339 - RNA, 25 nt, Artificial Sequence
  Synthetic Oligonucleotide
uuacuaagggcucucaccgaagagg

SEQ ID NO: 16340 - RNA, 25 nt, Artificial Sequence
  Synthetic Oligonucleotide
uuacuaagggccuucaccgaagagg

SEQ ID NO: 16341 - RNA, 25 nt, Artificial Sequence
  Synthetic Oligonucleotide
uuacuaagggccuucaccgaggagg

SEQ ID NO: 16342 - RNA, 25 nt, Artificial Sequence
  Synthetic Oligonucleotide
uuacuaagggguuucaccgaagagg

SEQ ID NO: 16343 - RNA, 25 nt, Artificial Sequence
  Synthetic Oligonucleotide
uuacuaagagcuuucaccgaagagg

SEQ ID NO: 16344 - RNA, 25 nt, Artificial Sequence
  Synthetic Oligonucleotide
uuacuaaaggcuuucaccgaagagg

SEQ ID NO: 16345 - RNA, 25 nt, Artificial Sequence
  Synthetic Oligonucleotide
uuacugagggcuuucaccgaagagg

SEQ ID NO: 16346 - RNA, 25 nt, Artificial Sequence
  Synthetic Oligonucleotide
uuacuuagggcuuucaccgaagagg

SEQ ID NO: 16347 - RNA, 25 nt, Artificial Sequence
  Synthetic Oligonucleotide
uuacaaagggcuuucaccgaagagg

SEQ ID NO: 16348 - RNA, 25 nt, Artificial Sequence
  Synthetic Oligonucleotide
uuauuaagggcuuucaccgaagagg

SEQ ID NO: 16349 - RNA, 25 nt, Artificial Sequence
  Synthetic Oligonucleotide
uugcuaagggcuuucaccgaagagg

SEQ ID NO: 16350 - RNA, 25 nt, Artificial Sequence
  Synthetic Oligonucleotide
uugcuaagggcuuucaccgaggagg

SEQ ID NO: 16351 - RNA, 25 nt, Artificial Sequence
  Synthetic Oligonucleotide
ucacuaagggcuuucaccgaagagg

SEQ ID NO: 16352 - RNA, 25 nt, Artificial Sequence
  Synthetic Oligonucleotide
cuacuaagggcuuucaccgaagagg

SEQ ID NO: 16353 - RNA, 25 nt, Artificial Sequence
  Synthetic Oligonucleotide
cuacuaagggcuuucacugaggagg

SEQ ID NO: 16354 - RNA, 25 nt, Artificial Sequence
  Synthetic Oligonucleotide
cuacuaagggccuucaccgaggagg

SEQ ID NO: 16355 - RNA, 25 nt, Artificial Sequence
  Synthetic Oligonucleotide
gggcuuucaccgaagagggagcagu

SEQ ID NO: 16356 - RNA, 25 nt, Artificial Sequence
  Synthetic Oligonucleotide
gggcuuucaccgaagagggaguaau

SEQ ID NO: 16357 - RNA, 25 nt, Artificial Sequence
  Synthetic Oligonucleotide
gggcuuucaccgaagagggaacaau

SEQ ID NO: 16358 - RNA, 25 nt, Artificial Sequence
  Synthetic Oligonucleotide
gggcuuucaccgaagagggacgaau

SEQ ID NO: 16359 - RNA, 25 nt, Artificial Sequence
  Synthetic Oligonucleotide
gggcuuucaccgaagagggcgcaau

SEQ ID NO: 16360 - RNA, 25 nt, Artificial Sequence
  Synthetic Oligonucleotide
gggcuuucaccgaagagggggcaau

SEQ ID NO: 16361 - RNA, 25 nt, Artificial Sequence
  Synthetic Oligonucleotide
gggcuuucaccgaagagggugcaau

SEQ ID NO: 16362 - RNA, 25 nt, Artificial Sequence
  Synthetic Oligonucleotide
gggcuuucaccgaagaggaagcaau

SEQ ID NO: 16363 - RNA, 25 nt, Artificial Sequence
  Synthetic Oligonucleotide
gggcuuucaccgaagaaggagcaau

SEQ ID NO: 16364 - RNA, 25 nt, Artificial Sequence
  Synthetic Oligonucleotide
gggcuuucaccgaagauggagcaau

SEQ ID NO: 16365 - RNA, 25 nt, Artificial Sequence
  Synthetic Oligonucleotide
gggcuuucaccgaagcgggagcaau

SEQ ID NO: 16366 - RNA, 25 nt, Artificial Sequence
  Synthetic Oligonucleotide
gggcuuucaccgaaaagggagcaau

SEQ ID NO: 16367 - RNA, 25 nt, Artificial Sequence
  Synthetic Oligonucleotide
gggcuuucaccgaggagggagcaau

SEQ ID NO: 16368 - RNA, 25 nt, Artificial Sequence
  Synthetic Oligonucleotide
gggcuuucaccaaagagggagcaau

SEQ ID NO: 16369 - RNA, 25 nt, Artificial Sequence
  Synthetic Oligonucleotide
gggcuuucacagaagagggagcaau

SEQ ID NO: 16370 - RNA, 25 nt, Artificial Sequence
  Synthetic Oligonucleotide
gggcuuucacugaagagggagcaau

SEQ ID NO: 16371 - RNA, 25 nt, Artificial Sequence
  Synthetic Oligonucleotide
gggcuuucaucgaagagggagcaau

SEQ ID NO: 16372 - RNA, 25 nt, Artificial Sequence
  Synthetic Oligonucleotide
gggcuuuuaccgaagagggagcaau

SEQ ID NO: 16373 - RNA, 25 nt, Artificial Sequence
  Synthetic Oligonucleotide
gggcuaucaccgaagagggagcaau

SEQ ID NO: 16374 - RNA, 25 nt, Artificial Sequence
  Synthetic Oligonucleotide
gggcucucaccgaagagggagcaau

SEQ ID NO: 16375 - RNA, 25 nt, Artificial Sequence
  Synthetic Oligonucleotide
gggccuucaccgaagagggagcaau

SEQ ID NO: 16376 - RNA, 25 nt, Artificial Sequence
  Synthetic Oligonucleotide
gggccuucaccgaagagggaacaau

SEQ ID NO: 16377 - RNA, 25 nt, Artificial Sequence
  Synthetic Oligonucleotide
gggccuucaccgaagaggggacaau

SEQ ID NO: 16378 - RNA, 25 nt, Artificial Sequence
  Synthetic Oligonucleotide
gggguuucaccgaagagggagcaau

SEQ ID NO: 16379 - RNA, 25 nt, Artificial Sequence
  Synthetic Oligonucleotide
gagcuuucaccgaagagggagcaau

SEQ ID NO: 16380 - RNA, 25 nt, Artificial Sequence
  Synthetic Oligonucleotide
aggcuuucaccgaagagggagcaau

SEQ ID NO: 16381 - RNA, 25 nt, Artificial Sequence
  Synthetic Oligonucleotide
gggcuuucacugaggagggagcaau

SEQ ID NO: 16382 - RNA, 25 nt, Artificial Sequence
  Synthetic Oligonucleotide
gggccuucaccgaggagggagcaau

SEQ ID NO: 16383 - RNA, 25 nt, Artificial Sequence
  Synthetic Oligonucleotide
gagcuuucacagaagagggagcaau

SEQ ID NO: 16384 - RNA, 25 nt, Artificial Sequence
  Synthetic Oligonucleotide
gagcuuucacagaagaaggagcaau

SEQ ID NO: 16385 - RNA, 25 nt, Artificial Sequence
  Synthetic Oligonucleotide
gagcuuucacagaagaaggggcaau

SEQ ID NO: 16386 - RNA, 25 nt, Artificial Sequence
  Synthetic Oligonucleotide
gagcuuucacagaagggggagcaau

SEQ ID NO: 16387 - RNA, 25 nt, Artificial Sequence
  Synthetic Oligonucleotide
gagcuuucacggaagaaggggcaau

SEQ ID NO: 16388 - RNA, 25 nt, Artificial Sequence
  Synthetic Oligonucleotide
gagcuuucacugaagaaggagcaau

SEQ ID NO: 16389 - RNA, 25 nt, Artificial Sequence
  Synthetic Oligonucleotide
agggcuuucaccgaagagggagcag

SEQ ID NO: 16390 - RNA, 25 nt, Artificial Sequence
  Synthetic Oligonucleotide
agggcuuucaccgaagagggaguaa

SEQ ID NO: 16391 - RNA, 25 nt, Artificial Sequence
  Synthetic Oligonucleotide
agggcuuucaccgaagagggaacaa

SEQ ID NO: 16392 - RNA, 25 nt, Artificial Sequence
  Synthetic Oligonucleotide
agggcuuucaccgaagagggacgaa

SEQ ID NO: 16393 - RNA, 25 nt, Artificial Sequence
  Synthetic Oligonucleotide
agggcuuucaccgaagagggcgcaa

SEQ ID NO: 16394 - RNA, 25 nt, Artificial Sequence
  Synthetic Oligonucleotide
agggcuuucaccgaagagggggcaa

SEQ ID NO: 16395 - RNA, 25 nt, Artificial Sequence
  Synthetic Oligonucleotide
agggcuuucaccgaagagggugcaa

SEQ ID NO: 16396 - RNA, 25 nt, Artificial Sequence
  Synthetic Oligonucleotide
agggcuuucaccgaagaggaagcaa

SEQ ID NO: 16397 - RNA, 25 nt, Artificial Sequence
  Synthetic Oligonucleotide
agggcuuucaccgaagaaggagcaa

SEQ ID NO: 16398 - RNA, 25 nt, Artificial Sequence
  Synthetic Oligonucleotide
agggcuuucaccgaagauggagcaa

SEQ ID NO: 16399 - RNA, 25 nt, Artificial Sequence
  Synthetic Oligonucleotide
agggcuuucaccgaagcgggagcaa

SEQ ID NO: 16400 - RNA, 25 nt, Artificial Sequence
  Synthetic Oligonucleotide
agggcuuucaccgaaaagggagcaa

SEQ ID NO: 16401 - RNA, 25 nt, Artificial Sequence
  Synthetic Oligonucleotide
agggcuuucaccgaggagggagcaa

SEQ ID NO: 16402 - RNA, 25 nt, Artificial Sequence
  Synthetic Oligonucleotide
agggcuuucaccaaagagggagcaa

SEQ ID NO: 16403 - RNA, 25 nt, Artificial Sequence
  Synthetic Oligonucleotide
agggcuuucacagaagagggagcaa

SEQ ID NO: 16404 - RNA, 25 nt, Artificial Sequence
  Synthetic Oligonucleotide
agggcuuucacugaagagggagcaa

SEQ ID NO: 16405 - RNA, 25 nt, Artificial Sequence
  Synthetic Oligonucleotide
agggcuuucaucgaagagggagcaa

SEQ ID NO: 16406 - RNA, 25 nt, Artificial Sequence
  Synthetic Oligonucleotide
agggcuuuuaccgaagagggagcaa

SEQ ID NO: 16407 - RNA, 25 nt, Artificial Sequence
  Synthetic Oligonucleotide
agggcuaucaccgaagagggagcaa

SEQ ID NO: 16408 - RNA, 25 nt, Artificial Sequence
  Synthetic Oligonucleotide
agggcucucaccgaagagggagcaa

SEQ ID NO: 16409 - RNA, 25 nt, Artificial Sequence
  Synthetic Oligonucleotide
agggccuucaccgaagagggagcaa

SEQ ID NO: 16410 - RNA, 25 nt, Artificial Sequence
  Synthetic Oligonucleotide
agggccuucaccgaagagggaacaa

SEQ ID NO: 16411 - RNA, 25 nt, Artificial Sequence
  Synthetic Oligonucleotide
agggccuucaccgaagaggggacaa

SEQ ID NO: 16412 - RNA, 25 nt, Artificial Sequence
  Synthetic Oligonucleotide
agggguuucaccgaagagggagcaa

SEQ ID NO: 16413 - RNA, 25 nt, Artificial Sequence
  Synthetic Oligonucleotide
agagcuuucaccgaagagggagcaa

SEQ ID NO: 16414 - RNA, 25 nt, Artificial Sequence
  Synthetic Oligonucleotide
aaggcuuucaccgaagagggagcaa

SEQ ID NO: 16415 - RNA, 25 nt, Artificial Sequence
  Synthetic Oligonucleotide
agggcuuucacugaggagggagcaa

SEQ ID NO: 16416 - RNA, 25 nt, Artificial Sequence
  Synthetic Oligonucleotide
agggccuucaccgaggagggagcaa

SEQ ID NO: 16417 - RNA, 25 nt, Artificial Sequence
  Synthetic Oligonucleotide
agagcuuucacagaagagggagcaa

SEQ ID NO: 16418 - RNA, 25 nt, Artificial Sequence
  Synthetic Oligonucleotide
agagcuuucacagaagaaggagcaa

SEQ ID NO: 16419 - RNA, 25 nt, Artificial Sequence
  Synthetic Oligonucleotide
agagcuuucacagaagaaggggcaa

SEQ ID NO: 16420 - RNA, 25 nt, Artificial Sequence
  Synthetic Oligonucleotide
agagcuuucacagaagggggagcaa

SEQ ID NO: 16421 - RNA, 25 nt, Artificial Sequence
  Synthetic Oligonucleotide
agagcuuucacggaagaaggggcaa

SEQ ID NO: 16422 - RNA, 25 nt, Artificial Sequence
  Synthetic Oligonucleotide
agagcuuucacugaagaaggagcaa

SEQ ID NO: 16423 - RNA, 25 nt, Artificial Sequence
  Synthetic Oligonucleotide
uaagggcuuucaccgaagagggagu

SEQ ID NO: 16424 - RNA, 25 nt, Artificial Sequence
  Synthetic Oligonucleotide
uaagggcuuucaccgaagagggaac

SEQ ID NO: 16425 - RNA, 25 nt, Artificial Sequence
  Synthetic Oligonucleotide
uaagggcuuucaccgaagagggacg

SEQ ID NO: 16426 - RNA, 25 nt, Artificial Sequence
  Synthetic Oligonucleotide
uaagggcuuucaccgaagagggcgc

SEQ ID NO: 16427 - RNA, 25 nt, Artificial Sequence
  Synthetic Oligonucleotide
uaagggcuuucaccgaagagggggc

SEQ ID NO: 16428 - RNA, 25 nt, Artificial Sequence
  Synthetic Oligonucleotide
uaagggcuuucaccgaagagggugc

SEQ ID NO: 16429 - RNA, 25 nt, Artificial Sequence
  Synthetic Oligonucleotide
uaagggcuuucaccgaagaggaagc

SEQ ID NO: 16430 - RNA, 25 nt, Artificial Sequence
  Synthetic Oligonucleotide
uaagggcuuucaccgaagaaggagc

SEQ ID NO: 16431 - RNA, 25 nt, Artificial Sequence
  Synthetic Oligonucleotide
uaagggcuuucaccgaagauggagc

SEQ ID NO: 16432 - RNA, 25 nt, Artificial Sequence
  Synthetic Oligonucleotide
uaagggcuuucaccgaagcgggagc

SEQ ID NO: 16433 - RNA, 25 nt, Artificial Sequence
  Synthetic Oligonucleotide
uaagggcuuucaccgaaaagggagc

SEQ ID NO: 16434 - RNA, 25 nt, Artificial Sequence
  Synthetic Oligonucleotide
uaagggcuuucaccgaggagggagc

SEQ ID NO: 16435 - RNA, 25 nt, Artificial Sequence
  Synthetic Oligonucleotide
uaagggcuuucaccaaagagggagc

SEQ ID NO: 16436 - RNA, 25 nt, Artificial Sequence
  Synthetic Oligonucleotide
uaagggcuuucacagaagagggagc

SEQ ID NO: 16437 - RNA, 25 nt, Artificial Sequence
  Synthetic Oligonucleotide
uaagggcuuucacugaagagggagc

SEQ ID NO: 16438 - RNA, 25 nt, Artificial Sequence
  Synthetic Oligonucleotide
uaagggcuuucaucgaagagggagc

SEQ ID NO: 16439 - RNA, 25 nt, Artificial Sequence
  Synthetic Oligonucleotide
uaagggcuuuuaccgaagagggagc

SEQ ID NO: 16440 - RNA, 25 nt, Artificial Sequence
  Synthetic Oligonucleotide
uaagggcuaucaccgaagagggagc

SEQ ID NO: 16441 - RNA, 25 nt, Artificial Sequence
  Synthetic Oligonucleotide
uaagggcucucaccgaagagggagc

SEQ ID NO: 16442 - RNA, 25 nt, Artificial Sequence
  Synthetic Oligonucleotide
uaagggccuucaccgaagagggagc

SEQ ID NO: 16443 - RNA, 25 nt, Artificial Sequence
  Synthetic Oligonucleotide
uaagggccuucaccgaagagggaac

SEQ ID NO: 16444 - RNA, 25 nt, Artificial Sequence
  Synthetic Oligonucleotide
uaagggccuucaccgaagaggggac

SEQ ID NO: 16445 - RNA, 25 nt, Artificial Sequence
  Synthetic Oligonucleotide
uaagggguuucaccgaagagggagc

SEQ ID NO: 16446 - RNA, 25 nt, Artificial Sequence
  Synthetic Oligonucleotide
uaagagcuuucaccgaagagggagc

SEQ ID NO: 16447 - RNA, 25 nt, Artificial Sequence
  Synthetic Oligonucleotide
uaaaggcuuucaccgaagagggagc

SEQ ID NO: 16448 - RNA, 25 nt, Artificial Sequence
  Synthetic Oligonucleotide
ugagggcuuucaccgaagagggagc

SEQ ID NO: 16449 - RNA, 25 nt, Artificial Sequence
  Synthetic Oligonucleotide
uuagggcuuucaccgaagagggagc

SEQ ID NO: 16450 - RNA, 25 nt, Artificial Sequence
  Synthetic Oligonucleotide
aaagggcuuucaccgaagagggagc

SEQ ID NO: 16451 - RNA, 25 nt, Artificial Sequence
  Synthetic Oligonucleotide
uaagggcuuucacugaggagggagc

SEQ ID NO: 16452 - RNA, 25 nt, Artificial Sequence
  Synthetic Oligonucleotide
uaagggccuucaccgaggagggagc

SEQ ID NO: 16453 - RNA, 25 nt, Artificial Sequence
  Synthetic Oligonucleotide
ucagagcuuucacugaagaaggagc

SEQ ID NO: 16454 - RNA, 25 nt, Artificial Sequence
  Synthetic Oligonucleotide
uuagagcuuucacagaagagggagc

SEQ ID NO: 16455 - RNA, 25 nt, Artificial Sequence
  Synthetic Oligonucleotide
uuagagcuuucacagaagaaggagc

SEQ ID NO: 16456 - RNA, 25 nt, Artificial Sequence
  Synthetic Oligonucleotide
uuagagcuuucacagaagaaggggc

SEQ ID NO: 16457 - RNA, 25 nt, Artificial Sequence
  Synthetic Oligonucleotide
uuagagcuuucacggaagaaggggc

SEQ ID NO: 16458 - RNA, 25 nt, Artificial Sequence
  Synthetic Oligonucleotide
acuaagggcuuucaccgaagagggc

SEQ ID NO: 16459 - RNA, 25 nt, Artificial Sequence
  Synthetic Oligonucleotide
acuaagggcuuucaccgaagagggg

SEQ ID NO: 16460 - RNA, 25 nt, Artificial Sequence
  Synthetic Oligonucleotide
acuaagggcuuucaccgaagagggu

SEQ ID NO: 16461 - RNA, 25 nt, Artificial Sequence
  Synthetic Oligonucleotide
acuaagggcuuucaccgaagaggaa

SEQ ID NO: 16462 - RNA, 25 nt, Artificial Sequence
  Synthetic Oligonucleotide
acuaagggcuuucaccgaagaagga

SEQ ID NO: 16463 - RNA, 25 nt, Artificial Sequence
  Synthetic Oligonucleotide
acuaagggcuuucaccgaagaugga

SEQ ID NO: 16464 - RNA, 25 nt, Artificial Sequence
  Synthetic Oligonucleotide
acuaagggcuuucaccgaagcggga

SEQ ID NO: 16465 - RNA, 25 nt, Artificial Sequence
  Synthetic Oligonucleotide
acuaagggcuuucaccgaaaaggga

SEQ ID NO: 16466 - RNA, 25 nt, Artificial Sequence
  Synthetic Oligonucleotide
acuaagggcuuucaccaaagaggga

SEQ ID NO: 16467 - RNA, 25 nt, Artificial Sequence
  Synthetic Oligonucleotide
acuaagggcuuucacagaagaggga

SEQ ID NO: 16468 - RNA, 25 nt, Artificial Sequence
  Synthetic Oligonucleotide
acuaagggcuuucacugaagaggga

SEQ ID NO: 16469 - RNA, 25 nt, Artificial Sequence
  Synthetic Oligonucleotide
acuaagggcuuucaucgaagaggga

SEQ ID NO: 16470 - RNA, 25 nt, Artificial Sequence
  Synthetic Oligonucleotide
acuaagggcuuuuaccgaagaggga

SEQ ID NO: 16471 - RNA, 25 nt, Artificial Sequence
  Synthetic Oligonucleotide
acuaagggcuaucaccgaagaggga

SEQ ID NO: 16472 - RNA, 25 nt, Artificial Sequence
  Synthetic Oligonucleotide
acuaagggcucucaccgaagaggga

SEQ ID NO: 16473 - RNA, 25 nt, Artificial Sequence
  Synthetic Oligonucleotide
acuaagggccuucaccgaagaggga

SEQ ID NO: 16474 - RNA, 25 nt, Artificial Sequence
  Synthetic Oligonucleotide
acuaagggccuucaccgaagagggg

SEQ ID NO: 16475 - RNA, 25 nt, Artificial Sequence
  Synthetic Oligonucleotide
acuaagggguuucaccgaagaggga

SEQ ID NO: 16476 - RNA, 25 nt, Artificial Sequence
  Synthetic Oligonucleotide
acuaagagcuuucaccgaagaggga

SEQ ID NO: 16477 - RNA, 25 nt, Artificial Sequence
  Synthetic Oligonucleotide
acuaaaggcuuucaccgaagaggga

SEQ ID NO: 16478 - RNA, 25 nt, Artificial Sequence
  Synthetic Oligonucleotide
acugagggcuuucaccgaagaggga

SEQ ID NO: 16479 - RNA, 25 nt, Artificial Sequence
  Synthetic Oligonucleotide
acuuagggcuuucaccgaagaggga

SEQ ID NO: 16480 - RNA, 25 nt, Artificial Sequence
  Synthetic Oligonucleotide
acaaagggcuuucaccgaagaggga

SEQ ID NO: 16481 - RNA, 25 nt, Artificial Sequence
  Synthetic Oligonucleotide
auuaagggcuuucaccgaagaggga

SEQ ID NO: 16482 - RNA, 25 nt, Artificial Sequence
  Synthetic Oligonucleotide
gcuaagggcuuucaccgaagaggga

SEQ ID NO: 16483 - RNA, 25 nt, Artificial Sequence
  Synthetic Oligonucleotide
acuaagggcuuucacugaggaggga

SEQ ID NO: 16484 - RNA, 25 nt, Artificial Sequence
  Synthetic Oligonucleotide
acuaagggccuucaccgaggaggga

SEQ ID NO: 16485 - RNA, 25 nt, Artificial Sequence
  Synthetic Oligonucleotide
gcuaagggcuuucaccgaggaggga

SEQ ID NO: 16486 - RNA, 25 nt, Artificial Sequence
  Synthetic Oligonucleotide
acucagagcuuucacugaagaagga

SEQ ID NO: 16487 - RNA, 25 nt, Artificial Sequence
  Synthetic Oligonucleotide
acuuagagcuuucacagaagaggga

SEQ ID NO: 16488 - RNA, 25 nt, Artificial Sequence
  Synthetic Oligonucleotide
acuuagagcuuucacagaagaagga

SEQ ID NO: 16489 - RNA, 25 nt, Artificial Sequence
  Synthetic Oligonucleotide
acuuagagcuuucacagaagaaggg

SEQ ID NO: 16490 - RNA, 25 nt, Artificial Sequence
  Synthetic Oligonucleotide
acuuagagcuuucacagaaggggga

SEQ ID NO: 16491 - RNA, 25 nt, Artificial Sequence
  Synthetic Oligonucleotide
acuuagagcuuucacagaaggagga

SEQ ID NO: 16492 - RNA, 25 nt, Artificial Sequence
  Synthetic Oligonucleotide
uccuugaucggcuucgccgagauaa

SEQ ID NO: 16493 - RNA, 25 nt, Artificial Sequence
  Synthetic Oligonucleotide
uccuugaucggcuucgccgagacca

SEQ ID NO: 16494 - RNA, 25 nt, Artificial Sequence
  Synthetic Oligonucleotide
uccuugaucggcuucgccgawauca

SEQ ID NO: 16495 - RNA, 25 nt, Artificial Sequence
  Synthetic Oligonucleotide
uccuugaucggcuucgccgawwuca

SEQ ID NO: 16496 - RNA, 25 nt, Artificial Sequence
  Synthetic Oligonucleotide
uccuugaucggcuucgccgauauca

SEQ ID NO: 16497 - RNA, 25 nt, Artificial Sequence
  Synthetic Oligonucleotide
uccuugaucggcuucgccgggauca

SEQ ID NO: 16498 - RNA, 25 nt, Artificial Sequence
  Synthetic Oligonucleotide
uccuugaucggcuucgcagagauca

SEQ ID NO: 16499 - RNA, 25 nt, Artificial Sequence
  Synthetic Oligonucleotide
uccuugaucggcuucgucgagauca

SEQ ID NO: 16500 - RNA, 25 nt, Artificial Sequence
  Synthetic Oligonucleotide
uccuugaucggcuucaccgagauca

SEQ ID NO: 16501 - RNA, 25 nt, Artificial Sequence
  Synthetic Oligonucleotide
uccuugaucggcuuagccgagauca

SEQ ID NO: 16502 - RNA, 25 nt, Artificial Sequence
  Synthetic Oligonucleotide
uccuugaucggcuccgccgagauca

SEQ ID NO: 16503 - RNA, 25 nt, Artificial Sequence
  Synthetic Oligonucleotide
uccuugaucggcuccgccgagaucu

SEQ ID NO: 16504 - RNA, 25 nt, Artificial Sequence
  Synthetic Oligonucleotide
uccuugaucggauucgccgagauca

SEQ ID NO: 16505 - RNA, 25 nt, Artificial Sequence
  Synthetic Oligonucleotide
uccuugaucgacuucgccgagauca

SEQ ID NO: 16506 - RNA, 25 nt, Artificial Sequence
  Synthetic Oligonucleotide
uccuugauaggcuucgccgagauca

SEQ ID NO: 16507 - RNA, 25 nt, Artificial Sequence
  Synthetic Oligonucleotide
uccuugaccggcuucgccgagauca

SEQ ID NO: 16508 - RNA, 25 nt, Artificial Sequence
  Synthetic Oligonucleotide
uccuugaccggcuucgccgagacca

SEQ ID NO: 16509 - RNA, 25 nt, Artificial Sequence
  Synthetic Oligonucleotide
uccucgaucggcuucgccgagauca

SEQ ID NO: 16510 - RNA, 25 nt, Artificial Sequence
  Synthetic Oligonucleotide
ucauugaucggcuucgccgagauca

SEQ ID NO: 16511 - RNA, 25 nt, Artificial Sequence
  Synthetic Oligonucleotide
uucuugaucggcuucgccgagauca

SEQ ID NO: 16512 - RNA, 25 nt, Artificial Sequence
  Synthetic Oligonucleotide
uccuugauagacuucgccgagauca

SEQ ID NO: 16513 - RNA, 25 nt, Artificial Sequence
  Synthetic Oligonucleotide
uccuugaccggcuucgucgagauca

SEQ ID NO: 16514 - RNA, 25 nt, Artificial Sequence
  Synthetic Oligonucleotide
ucauugaccggcuucgccgagauca

SEQ ID NO: 16515 - RNA, 25 nt, Artificial Sequence
  Synthetic Oligonucleotide
uucucgaucggcuucgccgagauca

SEQ ID NO: 16516 - RNA, 25 nt, Artificial Sequence
  Synthetic Oligonucleotide
uccuugaccggguuugccgagauca

SEQ ID NO: 16517 - RNA, 25 nt, Artificial Sequence
  Synthetic Oligonucleotide
uucuugaccggcuccgccgggauca

SEQ ID NO: 16518 - RNA, 25 nt, Artificial Sequence
  Synthetic Oligonucleotide
uucuagaccggcuucgccgggauca

SEQ ID NO: 16519 - RNA, 25 nt, Artificial Sequence
  Synthetic Oligonucleotide
wccuugaucgacuucgcagagauca

SEQ ID NO: 16520 - RNA, 25 nt, Artificial Sequence
  Synthetic Oligonucleotide
uuccuugaucggcuucgccgagaua

SEQ ID NO: 16521 - RNA, 25 nt, Artificial Sequence
  Synthetic Oligonucleotide
uuccuugaucggcuucgccgagacc

SEQ ID NO: 16522 - RNA, 25 nt, Artificial Sequence
  Synthetic Oligonucleotide
uuccuugaucggcuucgccgawauc

SEQ ID NO: 16523 - RNA, 25 nt, Artificial Sequence
  Synthetic Oligonucleotide
uuccuugaucggcuucgccgawwuc

SEQ ID NO: 16524 - RNA, 25 nt, Artificial Sequence
  Synthetic Oligonucleotide
uuccuugaucggcuucgccgauauc

SEQ ID NO: 16525 - RNA, 25 nt, Artificial Sequence
  Synthetic Oligonucleotide
uuccuugaucggcuucgccgggauc

SEQ ID NO: 16526 - RNA, 25 nt, Artificial Sequence
  Synthetic Oligonucleotide
uuccuugaucggcuucgcagagauc

SEQ ID NO: 16527 - RNA, 25 nt, Artificial Sequence
  Synthetic Oligonucleotide
uuccuugaucggcuucgucgagauc

SEQ ID NO: 16528 - RNA, 25 nt, Artificial Sequence
  Synthetic Oligonucleotide
uuccuugaucggcuucaccgagauc

SEQ ID NO: 16529 - RNA, 25 nt, Artificial Sequence
  Synthetic Oligonucleotide
uuccuugaucggcuuagccgagauc

SEQ ID NO: 16530 - RNA, 25 nt, Artificial Sequence
  Synthetic Oligonucleotide
uuccuugaucggcuccgccgagauc

SEQ ID NO: 16531 - RNA, 25 nt, Artificial Sequence
  Synthetic Oligonucleotide
uuccuugaucggauucgccgagauc

SEQ ID NO: 16532 - RNA, 25 nt, Artificial Sequence
  Synthetic Oligonucleotide
uuccuugaucgacuucgccgagauc

SEQ ID NO: 16533 - RNA, 25 nt, Artificial Sequence
  Synthetic Oligonucleotide
uuccuugauaggcuucgccgagauc

SEQ ID NO: 16534 - RNA, 25 nt, Artificial Sequence
  Synthetic Oligonucleotide
uuccuugaccggcuucgccgagauc

SEQ ID NO: 16535 - RNA, 25 nt, Artificial Sequence
  Synthetic Oligonucleotide
uuccuugaccggcuucgccgagacc

SEQ ID NO: 16536 - RNA, 25 nt, Artificial Sequence
  Synthetic Oligonucleotide
uuccucgaucggcuucgccgagauc

SEQ ID NO: 16537 - RNA, 25 nt, Artificial Sequence
  Synthetic Oligonucleotide
uucauugaucggcuucgccgagauc

SEQ ID NO: 16538 - RNA, 25 nt, Artificial Sequence
  Synthetic Oligonucleotide
uuucuugaucggcuucgccgagauc

SEQ ID NO: 16539 - RNA, 25 nt, Artificial Sequence
  Synthetic Oligonucleotide
uuccuugauagacuucgccgagauc

SEQ ID NO: 16540 - RNA, 25 nt, Artificial Sequence
  Synthetic Oligonucleotide
uuccuugaccggcuucgucgagauc

SEQ ID NO: 16541 - RNA, 25 nt, Artificial Sequence
  Synthetic Oligonucleotide
uucauugaccggcuucgccgagauc

SEQ ID NO: 16542 - RNA, 25 nt, Artificial Sequence
  Synthetic Oligonucleotide
uuucucgaucggcuucgccgagauc

SEQ ID NO: 16543 - RNA, 25 nt, Artificial Sequence
  Synthetic Oligonucleotide
uuccuugaucggcuucwwwwwgauc

SEQ ID NO: 16544 - RNA, 25 nt, Artificial Sequence
  Synthetic Oligonucleotide
uuccuugaccggguuugccgagauc

SEQ ID NO: 16545 - RNA, 25 nt, Artificial Sequence
  Synthetic Oligonucleotide
uuucuugaccggcuccgccgggauc

SEQ ID NO: 16546 - RNA, 25 nt, Artificial Sequence
  Synthetic Oligonucleotide
uuucuagaccggcuucgccgggauc

SEQ ID NO: 16547 - RNA, 25 nt, Artificial Sequence
  Synthetic Oligonucleotide
uwccuugaucgacuucgcagagauc

SEQ ID NO: 16548 - RNA, 25 nt, Artificial Sequence
  Synthetic Oligonucleotide
ccuugaucggcuucgccgagaucaa

SEQ ID NO: 16549 - RNA, 25 nt, Artificial Sequence
  Synthetic Oligonucleotide
ccuugaucggcuucgccgagauaag

SEQ ID NO: 16550 - RNA, 25 nt, Artificial Sequence
  Synthetic Oligonucleotide
ccuugaucggcuucgccgagaccag

SEQ ID NO: 16551 - RNA, 25 nt, Artificial Sequence
  Synthetic Oligonucleotide
ccuugaucggcuucgccgawaucag

SEQ ID NO: 16552 - RNA, 25 nt, Artificial Sequence
  Synthetic Oligonucleotide
ccuugaucggcuucgccgawwucag

SEQ ID NO: 16553 - RNA, 25 nt, Artificial Sequence
  Synthetic Oligonucleotide
ccuugaucggcuucgccgauaucag

SEQ ID NO: 16554 - RNA, 25 nt, Artificial Sequence
  Synthetic Oligonucleotide
ccuugaucggcuucgccgggaucag

SEQ ID NO: 16555 - RNA, 25 nt, Artificial Sequence
  Synthetic Oligonucleotide
ccuugaucggcuucgcagagaucag

SEQ ID NO: 16556 - RNA, 25 nt, Artificial Sequence
  Synthetic Oligonucleotide
ccuugaucggcuucgucgagaucag

SEQ ID NO: 16557 - RNA, 25 nt, Artificial Sequence
  Synthetic Oligonucleotide
ccuugaucggcuucaccgagaucag

SEQ ID NO: 16558 - RNA, 25 nt, Artificial Sequence
  Synthetic Oligonucleotide
ccuugaucggcuuagccgagaucag

SEQ ID NO: 16559 - RNA, 25 nt, Artificial Sequence
  Synthetic Oligonucleotide
ccuugaucggcuccgccgagaucag

SEQ ID NO: 16560 - RNA, 25 nt, Artificial Sequence
  Synthetic Oligonucleotide
ccuugaucggcuccgccgagaucaa

SEQ ID NO: 16561 - RNA, 25 nt, Artificial Sequence
  Synthetic Oligonucleotide
ccuugaucggcuccgccgagaucuc

SEQ ID NO: 16562 - RNA, 25 nt, Artificial Sequence
  Synthetic Oligonucleotide
ccuugaucggauucgccgagaucag

SEQ ID NO: 16563 - RNA, 25 nt, Artificial Sequence
  Synthetic Oligonucleotide
ccuugaucgacuucgccgagaucag

SEQ ID NO: 16564 - RNA, 25 nt, Artificial Sequence
  Synthetic Oligonucleotide
ccuugauaggcuucgccgagaucag

SEQ ID NO: 16565 - RNA, 25 nt, Artificial Sequence
  Synthetic Oligonucleotide
ccuugaccggcuucgccgagaucag

SEQ ID NO: 16566 - RNA, 25 nt, Artificial Sequence
  Synthetic Oligonucleotide
ccuugaccggcuucgccgagaucaa

SEQ ID NO: 16567 - RNA, 25 nt, Artificial Sequence
  Synthetic Oligonucleotide
ccuugaccggcuucgccgagaccaa

SEQ ID NO: 16568 - RNA, 25 nt, Artificial Sequence
  Synthetic Oligonucleotide
ccucgaucggcuucgccgagaucag

SEQ ID NO: 16569 - RNA, 25 nt, Artificial Sequence
  Synthetic Oligonucleotide
cauugaucggcuucgccgagaucag

SEQ ID NO: 16570 - RNA, 25 nt, Artificial Sequence
  Synthetic Oligonucleotide
ucuugaucggcuucgccgagaucag

SEQ ID NO: 16571 - RNA, 25 nt, Artificial Sequence
  Synthetic Oligonucleotide
ucuugaucggcuucgccgagaucaa

SEQ ID NO: 16572 - RNA, 25 nt, Artificial Sequence
  Synthetic Oligonucleotide
ccuugaucgacuucgcagagaucag

SEQ ID NO: 16573 - RNA, 25 nt, Artificial Sequence
  Synthetic Oligonucleotide
ccuugauagacuucgccgagaucag

SEQ ID NO: 16574 - RNA, 25 nt, Artificial Sequence
  Synthetic Oligonucleotide
ccuugaccggcuucgucgagaucag

SEQ ID NO: 16575 - RNA, 25 nt, Artificial Sequence
  Synthetic Oligonucleotide
cauugaccggcuucgccgagaucag

SEQ ID NO: 16576 - RNA, 25 nt, Artificial Sequence
  Synthetic Oligonucleotide
ucucgaucggcuucgccgagaucag

SEQ ID NO: 16577 - RNA, 25 nt, Artificial Sequence
  Synthetic Oligonucleotide
ucucgaucggcuucgccgagaucaa

SEQ ID NO: 16578 - RNA, 25 nt, Artificial Sequence
  Synthetic Oligonucleotide
ccuugaccggguuugccgagaucag

SEQ ID NO: 16579 - RNA, 25 nt, Artificial Sequence
  Synthetic Oligonucleotide
auuacuaagggcuuucaccgaagaa

SEQ ID NO: 16580 - RNA, 25 nt, Artificial Sequence
  Synthetic Oligonucleotide
auuacuaagggcuuucaccgaagau

SEQ ID NO: 16581 - RNA, 25 nt, Artificial Sequence
  Synthetic Oligonucleotide
auuacuaagggcuuucaccgaagcg

SEQ ID NO: 16582 - RNA, 25 nt, Artificial Sequence
  Synthetic Oligonucleotide
auuacuaagggcuuucaccgaaaag

SEQ ID NO: 16583 - RNA, 25 nt, Artificial Sequence
  Synthetic Oligonucleotide
auuacuaagggcuuucaccaaagag

SEQ ID NO: 16584 - RNA, 25 nt, Artificial Sequence
  Synthetic Oligonucleotide
auuacuaagggcuuucacagaagag

SEQ ID NO: 16585 - RNA, 25 nt, Artificial Sequence
  Synthetic Oligonucleotide
auuacuaagggcuuucacugaagag

SEQ ID NO: 16586 - RNA, 25 nt, Artificial Sequence
  Synthetic Oligonucleotide
auuacuaagggcuuucaucgaagag

SEQ ID NO: 16587 - RNA, 25 nt, Artificial Sequence
  Synthetic Oligonucleotide
auuacuaagggcuuuuaccgaagag

SEQ ID NO: 16588 - RNA, 25 nt, Artificial Sequence
  Synthetic Oligonucleotide
auuacuaagggcuaucaccgaagag

SEQ ID NO: 16589 - RNA, 25 nt, Artificial Sequence
  Synthetic Oligonucleotide
auuacuaagggcucucaccgaagag

SEQ ID NO: 16590 - RNA, 25 nt, Artificial Sequence
  Synthetic Oligonucleotide
auuacuaagggccuucaccgaagag

SEQ ID NO: 16591 - RNA, 25 nt, Artificial Sequence
  Synthetic Oligonucleotide
auuacuaagggccuucaccgaggag

SEQ ID NO: 16592 - RNA, 25 nt, Artificial Sequence
  Synthetic Oligonucleotide
auuacuaagggguuucaccgaagag

SEQ ID NO: 16593 - RNA, 25 nt, Artificial Sequence
  Synthetic Oligonucleotide
auuacuaagagcuuucaccgaagag

SEQ ID NO: 16594 - RNA, 25 nt, Artificial Sequence
  Synthetic Oligonucleotide
auuacuaaaggcuuucaccgaagag

SEQ ID NO: 16595 - RNA, 25 nt, Artificial Sequence
  Synthetic Oligonucleotide
auuacugagggcuuucaccgaagag

SEQ ID NO: 16596 - RNA, 25 nt, Artificial Sequence
  Synthetic Oligonucleotide
auuacuuagggcuuucaccgaagag

SEQ ID NO: 16597 - RNA, 25 nt, Artificial Sequence
  Synthetic Oligonucleotide
auuacaaagggcuuucaccgaagag

SEQ ID NO: 16598 - RNA, 25 nt, Artificial Sequence
  Synthetic Oligonucleotide
auuauuaagggcuuucaccgaagag

SEQ ID NO: 16599 - RNA, 25 nt, Artificial Sequence
  Synthetic Oligonucleotide
auugcuaagggcuuucaccgaagag

SEQ ID NO: 16600 - RNA, 25 nt, Artificial Sequence
  Synthetic Oligonucleotide
auugcuaagggcuuucaccgaggag

SEQ ID NO: 16601 - RNA, 25 nt, Artificial Sequence
  Synthetic Oligonucleotide
aucacuaagggcuuucaccgaagag

SEQ ID NO: 16602 - RNA, 25 nt, Artificial Sequence
  Synthetic Oligonucleotide
acuacuaagggcuuucaccgaagag

SEQ ID NO: 16603 - RNA, 25 nt, Artificial Sequence
  Synthetic Oligonucleotide
guuacuaagggcuuucaccgaagag

SEQ ID NO: 16604 - RNA, 25 nt, Artificial Sequence
  Synthetic Oligonucleotide
uuuacuaagggcuuucaccgaagag

SEQ ID NO: 16605 - RNA, 25 nt, Artificial Sequence
  Synthetic Oligonucleotide
acuacuaagggcuuucacugaggag

SEQ ID NO: 16606 - RNA, 25 nt, Artificial Sequence
  Synthetic Oligonucleotide
acuacuaagggccuucaccgaggag

SEQ ID NO: 16607 - RNA, 25 nt, Artificial Sequence
  Synthetic Oligonucleotide
acagagauucgcuuggagaagcaau

SEQ ID NO: 16608 - RNA, 25 nt, Artificial Sequence
  Synthetic Oligonucleotide
acagagauucgcuuggagaagcauu

SEQ ID NO: 16609 - RNA, 25 nt, Artificial Sequence
  Synthetic Oligonucleotide
acagagauucgcuuggagaagccgu

SEQ ID NO: 16610 - RNA, 25 nt, Artificial Sequence
  Synthetic Oligonucleotide
acagagauucgcuuggagaagccau

SEQ ID NO: 16611 - RNA, 25 nt, Artificial Sequence
  Synthetic Oligonucleotide
acagagauucgcuuggagaagcugu

SEQ ID NO: 16612 - RNA, 25 nt, Artificial Sequence
  Synthetic Oligonucleotide
acagagauucgcuuggagaaacagu

SEQ ID NO: 16613 - RNA, 25 nt, Artificial Sequence
  Synthetic Oligonucleotide
acagagauucgcuuggagaaacagc

SEQ ID NO: 16614 - RNA, 25 nt, Artificial Sequence
  Synthetic Oligonucleotide
acagagauucgcuuggagaaaccgu

SEQ ID NO: 16615 - RNA, 25 nt, Artificial Sequence
  Synthetic Oligonucleotide
acagagauucgcuuggagaaucagu

SEQ ID NO: 16616 - RNA, 25 nt, Artificial Sequence
  Synthetic Oligonucleotide
acagagauucgcuuggagaggcagu

SEQ ID NO: 16617 - RNA, 25 nt, Artificial Sequence
  Synthetic Oligonucleotide
acagagauucgcuuggagaggcggu

SEQ ID NO: 16618 - RNA, 25 nt, Artificial Sequence
  Synthetic Oligonucleotide
acagagauucgcuuggagaugcagu

SEQ ID NO: 16619 - RNA, 25 nt, Artificial Sequence
  Synthetic Oligonucleotide
acagagauucgcuuggaggagcagu

SEQ ID NO: 16620 - RNA, 25 nt, Artificial Sequence
  Synthetic Oligonucleotide
acagagauucgcuuggaaaagcagu

SEQ ID NO: 16621 - RNA, 25 nt, Artificial Sequence
  Synthetic Oligonucleotide
acagagauucgcuuggggaagcagu

SEQ ID NO: 16622 - RNA, 25 nt, Artificial Sequence
  Synthetic Oligonucleotide
acagagauucgcuuggggaagcwwu

SEQ ID NO: 16623 - RNA, 25 nt, Artificial Sequence
  Synthetic Oligonucleotide
acagagauucgcuuggggaugcagu

SEQ ID NO: 16624 - RNA, 25 nt, Artificial Sequence
  Synthetic Oligonucleotide
acagagauucgcuuggwgaagcagu

SEQ ID NO: 16625 - RNA, 25 nt, Artificial Sequence
  Synthetic Oligonucleotide
acagagauucgcuuggugaaacagu

SEQ ID NO: 16626 - RNA, 25 nt, Artificial Sequence
  Synthetic Oligonucleotide
acagagauucgcuugaagaagcagu

SEQ ID NO: 16627 - RNA, 25 nt, Artificial Sequence
  Synthetic Oligonucleotide
acagagauucgcuuagagaagcagu

SEQ ID NO: 16628 - RNA, 25 nt, Artificial Sequence
  Synthetic Oligonucleotide
acagagauucgcuuwgagaagcagu

SEQ ID NO: 16629 - RNA, 25 nt, Artificial Sequence
  Synthetic Oligonucleotide
acagagauucacuuggagaagcagu

SEQ ID NO: 16630 - RNA, 25 nt, Artificial Sequence
  Synthetic Oligonucleotide
acagagauucucuuggagaagcagu

SEQ ID NO: 16631 - RNA, 25 nt, Artificial Sequence
  Synthetic Oligonucleotide
acagagauuugcuuggagaagcagu

SEQ ID NO: 16632 - RNA, 25 nt, Artificial Sequence
  Synthetic Oligonucleotide
acagagauacgcuuggagaagcagu

SEQ ID NO: 16633 - RNA, 25 nt, Artificial Sequence
  Synthetic Oligonucleotide
acagaaauucgcuuggagacgcagu

SEQ ID NO: 16634 - RNA, 25 nt, Artificial Sequence
  Synthetic Oligonucleotide
acaaagauucgcuuggagaagcagu

SEQ ID NO: 16635 - RNA, 25 nt, Artificial Sequence
  Synthetic Oligonucleotide
acaaagauucgcuuggggaagcagu

SEQ ID NO: 16636 - RNA, 25 nt, Artificial Sequence
  Synthetic Oligonucleotide
uacagagauucgcuuggagaagcaa

SEQ ID NO: 16637 - RNA, 25 nt, Artificial Sequence
  Synthetic Oligonucleotide
uacagagauucgcuuggagaagcau

SEQ ID NO: 16638 - RNA, 25 nt, Artificial Sequence
  Synthetic Oligonucleotide
uacagagauucgcuuggagaagccg

SEQ ID NO: 16639 - RNA, 25 nt, Artificial Sequence
  Synthetic Oligonucleotide
uacagagauucgcuuggagaagcca

SEQ ID NO: 16640 - RNA, 25 nt, Artificial Sequence
  Synthetic Oligonucleotide
uacagagauucgcuuggagaagcug

SEQ ID NO: 16641 - RNA, 25 nt, Artificial Sequence
  Synthetic Oligonucleotide
uacagagauucgcuuggagaaacag

SEQ ID NO: 16642 - RNA, 25 nt, Artificial Sequence
  Synthetic Oligonucleotide
uacagagauucgcuuggagaaaccg

SEQ ID NO: 16643 - RNA, 25 nt, Artificial Sequence
  Synthetic Oligonucleotide
uacagagauucgcuuggagaaucag

SEQ ID NO: 16644 - RNA, 25 nt, Artificial Sequence
  Synthetic Oligonucleotide
uacagagauucgcuuggagaggcag

SEQ ID NO: 16645 - RNA, 25 nt, Artificial Sequence
  Synthetic Oligonucleotide
uacagagauucgcuuggagaggcgg

SEQ ID NO: 16646 - RNA, 25 nt, Artificial Sequence
  Synthetic Oligonucleotide
uacagagauucgcuuggagaugcag

SEQ ID NO: 16647 - RNA, 25 nt, Artificial Sequence
  Synthetic Oligonucleotide
uacagagauucgcuuggaggagcag

SEQ ID NO: 16648 - RNA, 25 nt, Artificial Sequence
  Synthetic Oligonucleotide
uacagagauucgcuuggaaaagcag

SEQ ID NO: 16649 - RNA, 25 nt, Artificial Sequence
  Synthetic Oligonucleotide
uacagagauucgcuuggggaagcag

SEQ ID NO: 16650 - RNA, 25 nt, Artificial Sequence
  Synthetic Oligonucleotide
uacagagauucgcuuggggaagcww

SEQ ID NO: 16651 - RNA, 25 nt, Artificial Sequence
  Synthetic Oligonucleotide
uacagagauucgcuuggggaugcag

SEQ ID NO: 16652 - RNA, 25 nt, Artificial Sequence
  Synthetic Oligonucleotide
uacagagauucgcuuggwgaagcag

SEQ ID NO: 16653 - RNA, 25 nt, Artificial Sequence
  Synthetic Oligonucleotide
uacagagauucgcuuggugaaacag

SEQ ID NO: 16654 - RNA, 25 nt, Artificial Sequence
  Synthetic Oligonucleotide
uacagagauucgcuugaagaagcag

SEQ ID NO: 16655 - RNA, 25 nt, Artificial Sequence
  Synthetic Oligonucleotide
uacagagauucgcuuagagaagcag

SEQ ID NO: 16656 - RNA, 25 nt, Artificial Sequence
  Synthetic Oligonucleotide
uacagagauucgcuuwgagaagcag

SEQ ID NO: 16657 - RNA, 25 nt, Artificial Sequence
  Synthetic Oligonucleotide
uacagagauucacuuggagaagcag

SEQ ID NO: 16658 - RNA, 25 nt, Artificial Sequence
  Synthetic Oligonucleotide
uacagagauucucuuggagaagcag

SEQ ID NO: 16659 - RNA, 25 nt, Artificial Sequence
  Synthetic Oligonucleotide
uacagagauuugcuuggagaagcag

SEQ ID NO: 16660 - RNA, 25 nt, Artificial Sequence
  Synthetic Oligonucleotide
uacagagauacgcuuggagaagcag

SEQ ID NO: 16661 - RNA, 25 nt, Artificial Sequence
  Synthetic Oligonucleotide
uacagaaauucgcuuggagacgcag

SEQ ID NO: 16662 - RNA, 25 nt, Artificial Sequence
  Synthetic Oligonucleotide
uacaaagauucgcuuggagaagcag

SEQ ID NO: 16663 - RNA, 25 nt, Artificial Sequence
  Synthetic Oligonucleotide
uacaaagauucgcuuggggaagcag

SEQ ID NO: 16664 - RNA, 25 nt, Artificial Sequence
  Synthetic Oligonucleotide
ucuacagagauucgcuuggagaaac

SEQ ID NO: 16665 - RNA, 25 nt, Artificial Sequence
  Synthetic Oligonucleotide
ucuacagagauucgcuuggagaauc

SEQ ID NO: 16666 - RNA, 25 nt, Artificial Sequence
  Synthetic Oligonucleotide
ucuacagagauucgcuuggagaggc

SEQ ID NO: 16667 - RNA, 25 nt, Artificial Sequence
  Synthetic Oligonucleotide
ucuacagagauucgcuuggagaugc

SEQ ID NO: 16668 - RNA, 25 nt, Artificial Sequence
  Synthetic Oligonucleotide
ucuacagagauucgcuuggaggagc

SEQ ID NO: 16669 - RNA, 25 nt, Artificial Sequence
  Synthetic Oligonucleotide
ucuacagagauucgcuuggaaaagc

SEQ ID NO: 16670 - RNA, 25 nt, Artificial Sequence
  Synthetic Oligonucleotide
ucuacagagauucgcuuggggaagc

SEQ ID NO: 16671 - RNA, 25 nt, Artificial Sequence
  Synthetic Oligonucleotide
ucuacagagauucgcuuggggaugc

SEQ ID NO: 16672 - RNA, 25 nt, Artificial Sequence
  Synthetic Oligonucleotide
ucuacagagauucgcuuggwgaagc

SEQ ID NO: 16673 - RNA, 25 nt, Artificial Sequence
  Synthetic Oligonucleotide
ucuacagagauucgcuuggugaaac

SEQ ID NO: 16674 - RNA, 25 nt, Artificial Sequence
  Synthetic Oligonucleotide
ucuacagagauucgcuugaagaagc

SEQ ID NO: 16675 - RNA, 25 nt, Artificial Sequence
  Synthetic Oligonucleotide
ucuacagagauucgcuuagagaagc

SEQ ID NO: 16676 - RNA, 25 nt, Artificial Sequence
  Synthetic Oligonucleotide
ucuacagagauucgcuuwgagaagc

SEQ ID NO: 16677 - RNA, 25 nt, Artificial Sequence
  Synthetic Oligonucleotide
ucuacagagauucacuuggagaagc

SEQ ID NO: 16678 - RNA, 25 nt, Artificial Sequence
  Synthetic Oligonucleotide
ucuacagagauucucuuggagaagc

SEQ ID NO: 16679 - RNA, 25 nt, Artificial Sequence
  Synthetic Oligonucleotide
ucuacagagauuugcuuggagaagc

SEQ ID NO: 16680 - RNA, 25 nt, Artificial Sequence
  Synthetic Oligonucleotide
ucuacagaaauucgcuuggagacgc

SEQ ID NO: 16681 - RNA, 25 nt, Artificial Sequence
  Synthetic Oligonucleotide
ucuacaaagauucgcuuggagaagc

SEQ ID NO: 16682 - RNA, 25 nt, Artificial Sequence
  Synthetic Oligonucleotide
ucuacaaagauucgcuuggggaagc

SEQ ID NO: 16683 - RNA, 25 nt, Artificial Sequence
  Synthetic Oligonucleotide
uauacagagauucgcuuggagaagc

SEQ ID NO: 16684 - RNA, 25 nt, Artificial Sequence
  Synthetic Oligonucleotide
uauacagagauucgcuuggagaaac

SEQ ID NO: 16685 - RNA, 25 nt, Artificial Sequence
  Synthetic Oligonucleotide
uauacagagauucgcuuggagaggc

SEQ ID NO: 16686 - RNA, 25 nt, Artificial Sequence
  Synthetic Oligonucleotide
uauacagagauucgcuuggaaaagc

SEQ ID NO: 16687 - RNA, 25 nt, Artificial Sequence
  Synthetic Oligonucleotide
uauacagagauucgcuuggggaagc

SEQ ID NO: 16688 - RNA, 25 nt, Artificial Sequence
  Synthetic Oligonucleotide
uauacagagauacgcuuggagaagc

SEQ ID NO: 16689 - RNA, 25 nt, Artificial Sequence
  Synthetic Oligonucleotide
cuacagagauucgcuuggagaagcc

SEQ ID NO: 16690 - RNA, 25 nt, Artificial Sequence
  Synthetic Oligonucleotide
cuacagagauucgcuuggagaagcu

SEQ ID NO: 16691 - RNA, 25 nt, Artificial Sequence
  Synthetic Oligonucleotide
cuacagagauucgcuuggagaaaca

SEQ ID NO: 16692 - RNA, 25 nt, Artificial Sequence
  Synthetic Oligonucleotide
cuacagagauucgcuuggagaaacc

SEQ ID NO: 16693 - RNA, 25 nt, Artificial Sequence
  Synthetic Oligonucleotide
cuacagagauucgcuuggagaauca

SEQ ID NO: 16694 - RNA, 25 nt, Artificial Sequence
  Synthetic Oligonucleotide
cuacagagauucgcuuggagaggca

SEQ ID NO: 16695 - RNA, 25 nt, Artificial Sequence
  Synthetic Oligonucleotide
cuacagagauucgcuuggagaugca

SEQ ID NO: 16696 - RNA, 25 nt, Artificial Sequence
  Synthetic Oligonucleotide
cuacagagauucgcuuggaggagca

SEQ ID NO: 16697 - RNA, 25 nt, Artificial Sequence
  Synthetic Oligonucleotide
cuacagagauucgcuuggaaaagca

SEQ ID NO: 16698 - RNA, 25 nt, Artificial Sequence
  Synthetic Oligonucleotide
cuacagagauucgcuuggggaagca

SEQ ID NO: 16699 - RNA, 25 nt, Artificial Sequence
  Synthetic Oligonucleotide
cuacagagauucgcuuggggaagcw

SEQ ID NO: 16700 - RNA, 25 nt, Artificial Sequence
  Synthetic Oligonucleotide
cuacagagauucgcuuggggaugca

SEQ ID NO: 16701 - RNA, 25 nt, Artificial Sequence
  Synthetic Oligonucleotide
cuacagagauucgcuuggwgaagca

SEQ ID NO: 16702 - RNA, 25 nt, Artificial Sequence
  Synthetic Oligonucleotide
cuacagagauucgcuuggugaaaca

SEQ ID NO: 16703 - RNA, 25 nt, Artificial Sequence
  Synthetic Oligonucleotide
cuacagagauucgcuugaagaagca

SEQ ID NO: 16704 - RNA, 25 nt, Artificial Sequence
  Synthetic Oligonucleotide
cuacagagauucgcuuagagaagca

SEQ ID NO: 16705 - RNA, 25 nt, Artificial Sequence
  Synthetic Oligonucleotide
cuacagagauucgcuuwgagaagca

SEQ ID NO: 16706 - RNA, 25 nt, Artificial Sequence
  Synthetic Oligonucleotide
cuacagagauucacuuggagaagca

SEQ ID NO: 16707 - RNA, 25 nt, Artificial Sequence
  Synthetic Oligonucleotide
cuacagagauucucuuggagaagca

SEQ ID NO: 16708 - RNA, 25 nt, Artificial Sequence
  Synthetic Oligonucleotide
cuacagagauuugcuuggagaagca

SEQ ID NO: 16709 - RNA, 25 nt, Artificial Sequence
  Synthetic Oligonucleotide
cuacagaaauucgcuuggagacgca

SEQ ID NO: 16710 - RNA, 25 nt, Artificial Sequence
  Synthetic Oligonucleotide
cuacaaagauucgcuuggagaagca

SEQ ID NO: 16711 - RNA, 25 nt, Artificial Sequence
  Synthetic Oligonucleotide
auacagagauucgcuuggagaagca

SEQ ID NO: 16712 - RNA, 25 nt, Artificial Sequence
  Synthetic Oligonucleotide
auacagagauucgcuuggagaaaca

SEQ ID NO: 16713 - RNA, 25 nt, Artificial Sequence
  Synthetic Oligonucleotide
auacagagauucgcuuggagaggca

SEQ ID NO: 16714 - RNA, 25 nt, Artificial Sequence
  Synthetic Oligonucleotide
auacagagauucgcuuggagaggcg

SEQ ID NO: 16715 - RNA, 25 nt, Artificial Sequence
  Synthetic Oligonucleotide
auacagagauucgcuuggaaaagca

SEQ ID NO: 16716 - RNA, 25 nt, Artificial Sequence
  Synthetic Oligonucleotide
cuacaaagauucgcuuggggaagca

SEQ ID NO: 16717 - RNA, 25 nt, Artificial Sequence
  Synthetic Oligonucleotide
auacagagauucgcuuggggaagca

SEQ ID NO: 16718 - RNA, 25 nt, Artificial Sequence
  Synthetic Oligonucleotide
auacagagauacgcuuggagaagca

SEQ ID NO: 16719 - RNA, 25 nt, Artificial Sequence
  Synthetic Oligonucleotide
cagagauucgcuuggagaagcagug

SEQ ID NO: 16720 - RNA, 25 nt, Artificial Sequence
  Synthetic Oligonucleotide
cagagauucgcuuggagaagcaguu

SEQ ID NO: 16721 - RNA, 25 nt, Artificial Sequence
  Synthetic Oligonucleotide
cagagauucgcuuggagaagcaaua

SEQ ID NO: 16722 - RNA, 25 nt, Artificial Sequence
  Synthetic Oligonucleotide
cagagauucgcuuggagaagcauua

SEQ ID NO: 16723 - RNA, 25 nt, Artificial Sequence
  Synthetic Oligonucleotide
cagagauucgcuuggagaagcauug

SEQ ID NO: 16724 - RNA, 25 nt, Artificial Sequence
  Synthetic Oligonucleotide
cagagauucgcuuggagaagccgua

SEQ ID NO: 16725 - RNA, 25 nt, Artificial Sequence
  Synthetic Oligonucleotide
cagagauucgcuuggagaagccaua

SEQ ID NO: 16726 - RNA, 25 nt, Artificial Sequence
  Synthetic Oligonucleotide
cagagauucgcuuggagaagcugua

SEQ ID NO: 16727 - RNA, 25 nt, Artificial Sequence
  Synthetic Oligonucleotide
cagagauucgcuuggagaaacagua

SEQ ID NO: 16728 - RNA, 25 nt, Artificial Sequence
  Synthetic Oligonucleotide
cagagauucgcuuggagaaacagug

SEQ ID NO: 16729 - RNA, 25 nt, Artificial Sequence
  Synthetic Oligonucleotide
cagagauucgcuuggagaaacagca

SEQ ID NO: 16730 - RNA, 25 nt, Artificial Sequence
  Synthetic Oligonucleotide
cagagauucgcuuggagaaacagcg

SEQ ID NO: 16731 - RNA, 25 nt, Artificial Sequence
  Synthetic Oligonucleotide
cagagauucgcuuggagaaaccgua

SEQ ID NO: 16732 - RNA, 25 nt, Artificial Sequence
  Synthetic Oligonucleotide
cagagauucgcuuggagaaucagua

SEQ ID NO: 16733 - RNA, 25 nt, Artificial Sequence
  Synthetic Oligonucleotide
cagagauucgcuuggagaggcagua

SEQ ID NO: 16734 - RNA, 25 nt, Artificial Sequence
  Synthetic Oligonucleotide
cagagauucgcuuggagaggcagug

SEQ ID NO: 16735 - RNA, 25 nt, Artificial Sequence
  Synthetic Oligonucleotide
cagagauucgcuuggagaggcggug

SEQ ID NO: 16736 - RNA, 25 nt, Artificial Sequence
  Synthetic Oligonucleotide
cagagauucgcuuggagaugcagua

SEQ ID NO: 16737 - RNA, 25 nt, Artificial Sequence
  Synthetic Oligonucleotide
cagagauucgcuuggaggagcagua

SEQ ID NO: 16738 - RNA, 25 nt, Artificial Sequence
  Synthetic Oligonucleotide
cagagauucgcuuggaaaagcagua

SEQ ID NO: 16739 - RNA, 25 nt, Artificial Sequence
  Synthetic Oligonucleotide
cagagauucgcuuggggaagcagua

SEQ ID NO: 16740 - RNA, 25 nt, Artificial Sequence
  Synthetic Oligonucleotide
cagagauucgcuuggggaagcagug

SEQ ID NO: 16741 - RNA, 25 nt, Artificial Sequence
  Synthetic Oligonucleotide
cagagauucgcuuggggaagcwwua

SEQ ID NO: 16742 - RNA, 25 nt, Artificial Sequence
  Synthetic Oligonucleotide
cagagauucgcuuggwgaagcaguc

SEQ ID NO: 16743 - RNA, 25 nt, Artificial Sequence
  Synthetic Oligonucleotide
cagagauucgcuuggugaaacagua

SEQ ID NO: 16744 - RNA, 25 nt, Artificial Sequence
  Synthetic Oligonucleotide
cagagauucgcuugaagaagcagua

SEQ ID NO: 16745 - RNA, 25 nt, Artificial Sequence
  Synthetic Oligonucleotide
cagagauucgcuuagagaagcagua

SEQ ID NO: 16746 - RNA, 25 nt, Artificial Sequence
  Synthetic Oligonucleotide
cagagauucgcuuwgagaagcagua

SEQ ID NO: 16747 - RNA, 25 nt, Artificial Sequence
  Synthetic Oligonucleotide
cagagauucacuuggagaagcagua

SEQ ID NO: 16748 - RNA, 25 nt, Artificial Sequence
  Synthetic Oligonucleotide
cagagauucacuuggagaagcagug

SEQ ID NO: 16749 - RNA, 25 nt, Artificial Sequence
  Synthetic Oligonucleotide
cagagauucucuuggagaagcagua

SEQ ID NO: 16750 - RNA, 25 nt, Artificial Sequence
  Synthetic Oligonucleotide
cagagauuugcuuggagaagcagua

SEQ ID NO: 16751 - RNA, 25 nt, Artificial Sequence
  Synthetic Oligonucleotide
cagagauacgcuuggagaagcagug

SEQ ID NO: 16752 - RNA, 25 nt, Artificial Sequence
  Synthetic Oligonucleotide
caaagauucgcuuggagaagcagua

SEQ ID NO: 16753 - RNA, 25 nt, Artificial Sequence
  Synthetic Oligonucleotide
cagagauucgcuuggggaugcagua

SEQ ID NO: 16754 - RNA, 25 nt, Artificial Sequence
  Synthetic Oligonucleotide
cagaaauucgcuuggagacgcagua

SEQ ID NO: 16755 - RNA, 25 nt, Artificial Sequence
  Synthetic Oligonucleotide
caaagauucgcuuggggaagcagua

SEQ ID NO: 16756 - RNA, 25 nt, Artificial Sequence
  Synthetic Oligonucleotide
auucgcuuggagaagcaguacugag

SEQ ID NO: 16757 - RNA, 25 nt, Artificial Sequence
  Synthetic Oligonucleotide
auucgcuuggagaagcaguagugag

SEQ ID NO: 16758 - RNA, 25 nt, Artificial Sequence
  Synthetic Oligonucleotide
auucgcuuggagaagcagugaugag

SEQ ID NO: 16759 - RNA, 25 nt, Artificial Sequence
  Synthetic Oligonucleotide
auucgcuuggagaagcaguuaugag

SEQ ID NO: 16760 - RNA, 25 nt, Artificial Sequence
  Synthetic Oligonucleotide
auucgcuuggagaagcaauaaugag

SEQ ID NO: 16761 - RNA, 25 nt, Artificial Sequence
  Synthetic Oligonucleotide
auucgcuuggagaagcauuaaugag

SEQ ID NO: 16762 - RNA, 25 nt, Artificial Sequence
  Synthetic Oligonucleotide
auucgcuuggagaagcauugaugag

SEQ ID NO: 16763 - RNA, 25 nt, Artificial Sequence
  Synthetic Oligonucleotide
auucgcuuggagaagcauuggugag

SEQ ID NO: 16764 - RNA, 25 nt, Artificial Sequence
  Synthetic Oligonucleotide
auucgcuuggagaagccguaaugag

SEQ ID NO: 16765 - RNA, 25 nt, Artificial Sequence
  Synthetic Oligonucleotide
auucgcuuggagaagcuguaaugag

SEQ ID NO: 16766 - RNA, 25 nt, Artificial Sequence
  Synthetic Oligonucleotide
auucgcuuggagaaacaguaaugag

SEQ ID NO: 16767 - RNA, 25 nt, Artificial Sequence
  Synthetic Oligonucleotide
auucgcuuggagaaacagugaugag

SEQ ID NO: 16768 - RNA, 25 nt, Artificial Sequence
  Synthetic Oligonucleotide
auucgcuuggagaaucaguaaugag

SEQ ID NO: 16769 - RNA, 25 nt, Artificial Sequence
  Synthetic Oligonucleotide
auucgcuuggagacgcaguaaugag

SEQ ID NO: 16770 - RNA, 25 nt, Artificial Sequence
  Synthetic Oligonucleotide
auucgcuuggagaggcaguaaugag

SEQ ID NO: 16771 - RNA, 25 nt, Artificial Sequence
  Synthetic Oligonucleotide
auucgcuuggagaggcagugaugag

SEQ ID NO: 16772 - RNA, 25 nt, Artificial Sequence
  Synthetic Oligonucleotide
auucgcuuggagaugcaguaaugag

SEQ ID NO: 16773 - RNA, 25 nt, Artificial Sequence
  Synthetic Oligonucleotide
auucgcuuggaggagcaguaaugag

SEQ ID NO: 16774 - RNA, 25 nt, Artificial Sequence
  Synthetic Oligonucleotide
auucgcuuggaaaagcaguaaugag

SEQ ID NO: 16775 - RNA, 25 nt, Artificial Sequence
  Synthetic Oligonucleotide
auucgcuuggggaagcaguaaugag

SEQ ID NO: 16776 - RNA, 25 nt, Artificial Sequence
  Synthetic Oligonucleotide
auucgcuuggggaagcagugaugag

SEQ ID NO: 16777 - RNA, 25 nt, Artificial Sequence
  Synthetic Oligonucleotide
auucgcuuggwgaagcagucaugag

SEQ ID NO: 16778 - RNA, 25 nt, Artificial Sequence
  Synthetic Oligonucleotide
auucgcuugaagaagcaguaaugag

SEQ ID NO: 16779 - RNA, 25 nt, Artificial Sequence
  Synthetic Oligonucleotide
auucgcuuagagaagcaguaaugag

SEQ ID NO: 16780 - RNA, 25 nt, Artificial Sequence
  Synthetic Oligonucleotide
auucgcuuwgagaagcaguaaugag

SEQ ID NO: 16781 - RNA, 25 nt, Artificial Sequence
  Synthetic Oligonucleotide
auucacuuggagaagcaguaaugag

SEQ ID NO: 16782 - RNA, 25 nt, Artificial Sequence
  Synthetic Oligonucleotide
auucacuuggagaagcagugaugag

SEQ ID NO: 16783 - RNA, 25 nt, Artificial Sequence
  Synthetic Oligonucleotide
auucucuuggagaagcaguaaugag

SEQ ID NO: 16784 - RNA, 25 nt, Artificial Sequence
  Synthetic Oligonucleotide
auuugcuuggagaagcaguaaugag

SEQ ID NO: 16785 - RNA, 25 nt, Artificial Sequence
  Synthetic Oligonucleotide
auacgcuuggagaagcagugaugag

SEQ ID NO: 16786 - RNA, 25 nt, Artificial Sequence
  Synthetic Oligonucleotide
auucgcuuggagaagccauaaugag

SEQ ID NO: 16787 - RNA, 25 nt, Artificial Sequence
  Synthetic Oligonucleotide
auucgcuuggagaaacagcaaugag

SEQ ID NO: 16788 - RNA, 25 nt, Artificial Sequence
  Synthetic Oligonucleotide
auucgcuuggagaaacagcgaugag

SEQ ID NO: 16789 - RNA, 25 nt, Artificial Sequence
  Synthetic Oligonucleotide
auucgcuuggagaaaccguaaugag

SEQ ID NO: 16790 - RNA, 25 nt, Artificial Sequence
  Synthetic Oligonucleotide
auucgcuuggagaggcggugaugag

SEQ ID NO: 16791 - RNA, 25 nt, Artificial Sequence
  Synthetic Oligonucleotide
auucgcuuggggaugcaguaaugag

SEQ ID NO: 16792 - RNA, 25 nt, Artificial Sequence
  Synthetic Oligonucleotide
auucgcuuggugaaacaguaaugag

SEQ ID NO: 16793 - RNA, 25 nt, Artificial Sequence
  Synthetic Oligonucleotide
auucgcuuggggaagcwwuaaugag

SEQ ID NO: 16794 - RNA, 25 nt, Artificial Sequence
  Synthetic Oligonucleotide
gauucgcuuggagaagcaguacuga

SEQ ID NO: 16795 - RNA, 25 nt, Artificial Sequence
  Synthetic Oligonucleotide
gauucgcuuggagaagcaguaguga

SEQ ID NO: 16796 - RNA, 25 nt, Artificial Sequence
  Synthetic Oligonucleotide
gauucgcuuggagaagcagugauga

SEQ ID NO: 16797 - RNA, 25 nt, Artificial Sequence
  Synthetic Oligonucleotide
gauucgcuuggagaagcaguuauga

SEQ ID NO: 16798 - RNA, 25 nt, Artificial Sequence
  Synthetic Oligonucleotide
gauucgcuuggagaagcaauaauga

SEQ ID NO: 16799 - RNA, 25 nt, Artificial Sequence
  Synthetic Oligonucleotide
gauucgcuuggagaagcauuaauga

SEQ ID NO: 16800 - RNA, 25 nt, Artificial Sequence
  Synthetic Oligonucleotide
gauucgcuuggagaagcauugauga

SEQ ID NO: 16801 - RNA, 25 nt, Artificial Sequence
  Synthetic Oligonucleotide
gauucgcuuggagaagcauugguga

SEQ ID NO: 16802 - RNA, 25 nt, Artificial Sequence
  Synthetic Oligonucleotide
gauucgcuuggagaagccguaauga

SEQ ID NO: 16803 - RNA, 25 nt, Artificial Sequence
  Synthetic Oligonucleotide
gauucgcuuggagaagcuguaauga

SEQ ID NO: 16804 - RNA, 25 nt, Artificial Sequence
  Synthetic Oligonucleotide
gauucgcuuggagaaacaguaauga

SEQ ID NO: 16805 - RNA, 25 nt, Artificial Sequence
  Synthetic Oligonucleotide
gauucgcuuggagaaacagugauga

SEQ ID NO: 16806 - RNA, 25 nt, Artificial Sequence
  Synthetic Oligonucleotide
gauucgcuuggagaaacagcaauga

SEQ ID NO: 16807 - RNA, 25 nt, Artificial Sequence
  Synthetic Oligonucleotide
gauucgcuuggagaaacagcgauga

SEQ ID NO: 16808 - RNA, 25 nt, Artificial Sequence
  Synthetic Oligonucleotide
gauucgcuuggagaaucaguaauga

SEQ ID NO: 16809 - RNA, 25 nt, Artificial Sequence
  Synthetic Oligonucleotide
gauucgcuuggagaggcaguaauga

SEQ ID NO: 16810 - RNA, 25 nt, Artificial Sequence
  Synthetic Oligonucleotide
gauucgcuuggagaggcagugauga

SEQ ID NO: 16811 - RNA, 25 nt, Artificial Sequence
  Synthetic Oligonucleotide
gauucgcuuggagaugcaguaauga

SEQ ID NO: 16812 - RNA, 25 nt, Artificial Sequence
  Synthetic Oligonucleotide
gauucgcuuggaggagcaguaauga

SEQ ID NO: 16813 - RNA, 25 nt, Artificial Sequence
  Synthetic Oligonucleotide
gauucgcuuggaaaagcaguaauga

SEQ ID NO: 16814 - RNA, 25 nt, Artificial Sequence
  Synthetic Oligonucleotide
gauucgcuuggggaagcaguaauga

SEQ ID NO: 16815 - RNA, 25 nt, Artificial Sequence
  Synthetic Oligonucleotide
gauucgcuuggggaagcagugauga

SEQ ID NO: 16816 - RNA, 25 nt, Artificial Sequence
  Synthetic Oligonucleotide
gauucgcuuggwgaagcagucauga

SEQ ID NO: 16817 - RNA, 25 nt, Artificial Sequence
  Synthetic Oligonucleotide
gauucgcuugaagaagcaguaauga

SEQ ID NO: 16818 - RNA, 25 nt, Artificial Sequence
  Synthetic Oligonucleotide
gauucgcuuagagaagcaguaauga

SEQ ID NO: 16819 - RNA, 25 nt, Artificial Sequence
  Synthetic Oligonucleotide
gauucgcuuwgagaagcaguaauga

SEQ ID NO: 16820 - RNA, 25 nt, Artificial Sequence
  Synthetic Oligonucleotide
gauucacuuggagaagcaguaauga

SEQ ID NO: 16821 - RNA, 25 nt, Artificial Sequence
  Synthetic Oligonucleotide
gauucacuuggagaagcagugauga

SEQ ID NO: 16822 - RNA, 25 nt, Artificial Sequence
  Synthetic Oligonucleotide
gauucucuuggagaagcaguaauga

SEQ ID NO: 16823 - RNA, 25 nt, Artificial Sequence
  Synthetic Oligonucleotide
gauuugcuuggagaagcaguaauga

SEQ ID NO: 16824 - RNA, 25 nt, Artificial Sequence
  Synthetic Oligonucleotide
gauacgcuuggagaagcagugauga

SEQ ID NO: 16825 - RNA, 25 nt, Artificial Sequence
  Synthetic Oligonucleotide
gauucgcuuggagaagccauaauga

SEQ ID NO: 16826 - RNA, 25 nt, Artificial Sequence
  Synthetic Oligonucleotide
gauucgcuuggagaaaccguaauga

SEQ ID NO: 16827 - RNA, 25 nt, Artificial Sequence
  Synthetic Oligonucleotide
gauucgcuuggagaggcggugauga

SEQ ID NO: 16828 - RNA, 25 nt, Artificial Sequence
  Synthetic Oligonucleotide
gauucgcuuggggaugcaguaauga

SEQ ID NO: 16829 - RNA, 25 nt, Artificial Sequence
  Synthetic Oligonucleotide
gauucgcuuggugaaacaguaauga

SEQ ID NO: 16830 - RNA, 25 nt, Artificial Sequence
  Synthetic Oligonucleotide
aauucgcuuggagacgcaguaauga

SEQ ID NO: 16831 - RNA, 25 nt, Artificial Sequence
  Synthetic Oligonucleotide
gauucgcuuggggaagcwwuaauga

SEQ ID NO: 16832 - RNA, 25 nt, Artificial Sequence
  Synthetic Oligonucleotide
agauucgcuuggagaagcaguacug

SEQ ID NO: 16833 - RNA, 25 nt, Artificial Sequence
  Synthetic Oligonucleotide
agauucgcuuggagaagcaguagug

SEQ ID NO: 16834 - RNA, 25 nt, Artificial Sequence
  Synthetic Oligonucleotide
agauucgcuuggagaagcagugaug

SEQ ID NO: 16835 - RNA, 25 nt, Artificial Sequence
  Synthetic Oligonucleotide
agauucgcuuggagaagcaguuaug

SEQ ID NO: 16836 - RNA, 25 nt, Artificial Sequence
  Synthetic Oligonucleotide
agauucgcuuggagaagcaauaaug

SEQ ID NO: 16837 - RNA, 25 nt, Artificial Sequence
  Synthetic Oligonucleotide
agauucgcuuggagaagcauuaaug

SEQ ID NO: 16838 - RNA, 25 nt, Artificial Sequence
  Synthetic Oligonucleotide
agauucgcuuggagaagcauugaug

SEQ ID NO: 16839 - RNA, 25 nt, Artificial Sequence
  Synthetic Oligonucleotide
agauucgcuuggagaagcauuggug

SEQ ID NO: 16840 - RNA, 25 nt, Artificial Sequence
  Synthetic Oligonucleotide
agauucgcuuggagaagccguaaug

SEQ ID NO: 16841 - RNA, 25 nt, Artificial Sequence
  Synthetic Oligonucleotide
agauucgcuuggagaagccauaaug

SEQ ID NO: 16842 - RNA, 25 nt, Artificial Sequence
  Synthetic Oligonucleotide
agauucgcuuggagaagcuguaaug

SEQ ID NO: 16843 - RNA, 25 nt, Artificial Sequence
  Synthetic Oligonucleotide
agauucgcuuggagaaacaguaaug

SEQ ID NO: 16844 - RNA, 25 nt, Artificial Sequence
  Synthetic Oligonucleotide
agauucgcuuggagaaacagugaug

SEQ ID NO: 16845 - RNA, 25 nt, Artificial Sequence
  Synthetic Oligonucleotide
agauucgcuuggagaaacagcaaug

SEQ ID NO: 16846 - RNA, 25 nt, Artificial Sequence
  Synthetic Oligonucleotide
agauucgcuuggagaaacagcgaug

SEQ ID NO: 16847 - RNA, 25 nt, Artificial Sequence
  Synthetic Oligonucleotide
agauucgcuuggagaaucaguaaug

SEQ ID NO: 16848 - RNA, 25 nt, Artificial Sequence
  Synthetic Oligonucleotide
agauucgcuuggagaggcaguaaug

SEQ ID NO: 16849 - RNA, 25 nt, Artificial Sequence
  Synthetic Oligonucleotide
agauucgcuuggagaggcagugaug

SEQ ID NO: 16850 - RNA, 25 nt, Artificial Sequence
  Synthetic Oligonucleotide
agauucgcuuggagaugcaguaaug

SEQ ID NO: 16851 - RNA, 25 nt, Artificial Sequence
  Synthetic Oligonucleotide
agauucgcuuggaggagcaguaaug

SEQ ID NO: 16852 - RNA, 25 nt, Artificial Sequence
  Synthetic Oligonucleotide
agauucgcuuggaaaagcaguaaug

SEQ ID NO: 16853 - RNA, 25 nt, Artificial Sequence
  Synthetic Oligonucleotide
agauucgcuuggggaagcaguaaug

SEQ ID NO: 16854 - RNA, 25 nt, Artificial Sequence
  Synthetic Oligonucleotide
agauucgcuuggggaagcagugaug

SEQ ID NO: 16855 - RNA, 25 nt, Artificial Sequence
  Synthetic Oligonucleotide
agauucgcuuggwgaagcagucaug

SEQ ID NO: 16856 - RNA, 25 nt, Artificial Sequence
  Synthetic Oligonucleotide
agauucgcuugaagaagcaguaaug

SEQ ID NO: 16857 - RNA, 25 nt, Artificial Sequence
  Synthetic Oligonucleotide
agauucgcuuagagaagcaguaaug

SEQ ID NO: 16858 - RNA, 25 nt, Artificial Sequence
  Synthetic Oligonucleotide
agauucgcuuwgagaagcaguaaug

SEQ ID NO: 16859 - RNA, 25 nt, Artificial Sequence
  Synthetic Oligonucleotide
agauucacuuggagaagcaguaaug

SEQ ID NO: 16860 - RNA, 25 nt, Artificial Sequence
  Synthetic Oligonucleotide
agauucacuuggagaagcagugaug

SEQ ID NO: 16861 - RNA, 25 nt, Artificial Sequence
  Synthetic Oligonucleotide
agauucucuuggagaagcaguaaug

SEQ ID NO: 16862 - RNA, 25 nt, Artificial Sequence
  Synthetic Oligonucleotide
agauuugcuuggagaagcaguaaug

SEQ ID NO: 16863 - RNA, 25 nt, Artificial Sequence
  Synthetic Oligonucleotide
agauacgcuuggagaagcagugaug

SEQ ID NO: 16864 - RNA, 25 nt, Artificial Sequence
  Synthetic Oligonucleotide
agauucgcuuggagaaaccguaaug

SEQ ID NO: 16865 - RNA, 25 nt, Artificial Sequence
  Synthetic Oligonucleotide
agauucgcuuggagaggcggugaug

SEQ ID NO: 16866 - RNA, 25 nt, Artificial Sequence
  Synthetic Oligonucleotide
agauucgcuuggggaagcwwuaaug

SEQ ID NO: 16867 - RNA, 25 nt, Artificial Sequence
  Synthetic Oligonucleotide
agauucgcuuggggaugcaguaaug

SEQ ID NO: 16868 - RNA, 25 nt, Artificial Sequence
  Synthetic Oligonucleotide
agauucgcuuggugaaacaguaaug

SEQ ID NO: 16869 - RNA, 25 nt, Artificial Sequence
  Synthetic Oligonucleotide
aaauucgcuuggagacgcaguaaug

SEQ ID NO: 16870 - RNA, 25 nt, Artificial Sequence
  Synthetic Oligonucleotide
agagauucgcuuggagaagcaguac

SEQ ID NO: 16871 - RNA, 25 nt, Artificial Sequence
  Synthetic Oligonucleotide
agagauucgcuuggagaagcaguag

SEQ ID NO: 16872 - RNA, 25 nt, Artificial Sequence
  Synthetic Oligonucleotide
agagauucgcuuggagaagcaguga

SEQ ID NO: 16873 - RNA, 25 nt, Artificial Sequence
  Synthetic Oligonucleotide
agagauucgcuuggagaagcaguua

SEQ ID NO: 16874 - RNA, 25 nt, Artificial Sequence
  Synthetic Oligonucleotide
agagauucgcuuggagaagcaauaa

SEQ ID NO: 16875 - RNA, 25 nt, Artificial Sequence
  Synthetic Oligonucleotide
agagauucgcuuggagaagcauuaa

SEQ ID NO: 16876 - RNA, 25 nt, Artificial Sequence
  Synthetic Oligonucleotide
agagauucgcuuggagaagcauuga

SEQ ID NO: 16877 - RNA, 25 nt, Artificial Sequence
  Synthetic Oligonucleotide
agagauucgcuuggagaagcauugg

SEQ ID NO: 16878 - RNA, 25 nt, Artificial Sequence
  Synthetic Oligonucleotide
agagauucgcuuggagaagccguaa

SEQ ID NO: 16879 - RNA, 25 nt, Artificial Sequence
  Synthetic Oligonucleotide
agagauucgcuuggagaagccauaa

SEQ ID NO: 16880 - RNA, 25 nt, Artificial Sequence
  Synthetic Oligonucleotide
agagauucgcuuggagaagcuguaa

SEQ ID NO: 16881 - RNA, 25 nt, Artificial Sequence
  Synthetic Oligonucleotide
agagauucgcuuggagaaacaguaa

SEQ ID NO: 16882 - RNA, 25 nt, Artificial Sequence
  Synthetic Oligonucleotide
agagauucgcuuggagaaacaguga

SEQ ID NO: 16883 - RNA, 25 nt, Artificial Sequence
  Synthetic Oligonucleotide
agagauucgcuuggagaaacagcaa

SEQ ID NO: 16884 - RNA, 25 nt, Artificial Sequence
  Synthetic Oligonucleotide
agagauucgcuuggagaaacagcga

SEQ ID NO: 16885 - RNA, 25 nt, Artificial Sequence
  Synthetic Oligonucleotide
agagauucgcuuggagaaaccguaa

SEQ ID NO: 16886 - RNA, 25 nt, Artificial Sequence
  Synthetic Oligonucleotide
agagauucgcuuggagaaucaguaa

SEQ ID NO: 16887 - RNA, 25 nt, Artificial Sequence
  Synthetic Oligonucleotide
agagauucgcuuggagaggcaguaa

SEQ ID NO: 16888 - RNA, 25 nt, Artificial Sequence
  Synthetic Oligonucleotide
agagauucgcuuggagaggcaguga

SEQ ID NO: 16889 - RNA, 25 nt, Artificial Sequence
  Synthetic Oligonucleotide
agagauucgcuuggagaggcgguga

SEQ ID NO: 16890 - RNA, 25 nt, Artificial Sequence
  Synthetic Oligonucleotide
agagauucgcuuggagaugcaguaa

SEQ ID NO: 16891 - RNA, 25 nt, Artificial Sequence
  Synthetic Oligonucleotide
agagauucgcuuggaggagcaguaa

SEQ ID NO: 16892 - RNA, 25 nt, Artificial Sequence
  Synthetic Oligonucleotide
agagauucgcuuggaaaagcaguaa

SEQ ID NO: 16893 - RNA, 25 nt, Artificial Sequence
  Synthetic Oligonucleotide
agagauucgcuuggggaagcaguaa

SEQ ID NO: 16894 - RNA, 25 nt, Artificial Sequence
  Synthetic Oligonucleotide
agagauucgcuuggggaagcaguga

SEQ ID NO: 16895 - RNA, 25 nt, Artificial Sequence
  Synthetic Oligonucleotide
agagauucgcuuggggaagcwwuaa

SEQ ID NO: 16896 - RNA, 25 nt, Artificial Sequence
  Synthetic Oligonucleotide
agagauucgcuuggwgaagcaguca

SEQ ID NO: 16897 - RNA, 25 nt, Artificial Sequence
  Synthetic Oligonucleotide
agagauucgcuugaagaagcaguaa

SEQ ID NO: 16898 - RNA, 25 nt, Artificial Sequence
  Synthetic Oligonucleotide
agagauucgcuuagagaagcaguaa

SEQ ID NO: 16899 - RNA, 25 nt, Artificial Sequence
  Synthetic Oligonucleotide
agagauucgcuuwgagaagcaguaa

SEQ ID NO: 16900 - RNA, 25 nt, Artificial Sequence
  Synthetic Oligonucleotide
agagauucacuuggagaagcaguaa

SEQ ID NO: 16901 - RNA, 25 nt, Artificial Sequence
  Synthetic Oligonucleotide
agagauucacuuggagaagcaguga

SEQ ID NO: 16902 - RNA, 25 nt, Artificial Sequence
  Synthetic Oligonucleotide
agagauucucuuggagaagcaguaa

SEQ ID NO: 16903 - RNA, 25 nt, Artificial Sequence
  Synthetic Oligonucleotide
agagauuugcuuggagaagcaguaa

SEQ ID NO: 16904 - RNA, 25 nt, Artificial Sequence
  Synthetic Oligonucleotide
agagauacgcuuggagaagcaguga

SEQ ID NO: 16905 - RNA, 25 nt, Artificial Sequence
  Synthetic Oligonucleotide
aaagauucgcuuggagaagcaguaa

SEQ ID NO: 16906 - RNA, 25 nt, Artificial Sequence
  Synthetic Oligonucleotide
agagauucgcuuggggaugcaguaa

SEQ ID NO: 16907 - RNA, 25 nt, Artificial Sequence
  Synthetic Oligonucleotide
agagauucgcuuggugaaacaguaa

SEQ ID NO: 16908 - RNA, 25 nt, Artificial Sequence
  Synthetic Oligonucleotide
agaaauucgcuuggagacgcaguaa

SEQ ID NO: 16909 - RNA, 25 nt, Artificial Sequence
  Synthetic Oligonucleotide
aaagauucgcuuggggaagcaguaa

SEQ ID NO: 16910 - RNA, 25 nt, Artificial Sequence
  Synthetic Oligonucleotide
gagauucgcuuggagaagcaguacu

SEQ ID NO: 16911 - RNA, 25 nt, Artificial Sequence
  Synthetic Oligonucleotide
gagauucgcuuggagaagcaguagu

SEQ ID NO: 16912 - RNA, 25 nt, Artificial Sequence
  Synthetic Oligonucleotide
gagauucgcuuggagaagcagugau

SEQ ID NO: 16913 - RNA, 25 nt, Artificial Sequence
  Synthetic Oligonucleotide
gagauucgcuuggagaagcaguuau

SEQ ID NO: 16914 - RNA, 25 nt, Artificial Sequence
  Synthetic Oligonucleotide
gagauucgcuuggagaagcaauaau

SEQ ID NO: 16915 - RNA, 25 nt, Artificial Sequence
  Synthetic Oligonucleotide
gagauucgcuuggagaagcauuaau

SEQ ID NO: 16916 - RNA, 25 nt, Artificial Sequence
  Synthetic Oligonucleotide
gagauucgcuuggagaagcauugau

SEQ ID NO: 16917 - RNA, 25 nt, Artificial Sequence
  Synthetic Oligonucleotide
gagauucgcuuggagaagcauuggu

SEQ ID NO: 16918 - RNA, 25 nt, Artificial Sequence
  Synthetic Oligonucleotide
gagauucgcuuggagaagccguaau

SEQ ID NO: 16919 - RNA, 25 nt, Artificial Sequence
  Synthetic Oligonucleotide
gagauucgcuuggagaagccauaau

SEQ ID NO: 16920 - RNA, 25 nt, Artificial Sequence
  Synthetic Oligonucleotide
gagauucgcuuggagaagcuguaau

SEQ ID NO: 16921 - RNA, 25 nt, Artificial Sequence
  Synthetic Oligonucleotide
gagauucgcuuggagaaacaguaau

SEQ ID NO: 16922 - RNA, 25 nt, Artificial Sequence
  Synthetic Oligonucleotide
gagauucgcuuggagaaacagugau

SEQ ID NO: 16923 - RNA, 25 nt, Artificial Sequence
  Synthetic Oligonucleotide
gagauucgcuuggagaaacagcaau

SEQ ID NO: 16924 - RNA, 25 nt, Artificial Sequence
  Synthetic Oligonucleotide
gagauucgcuuggagaaacagcgau

SEQ ID NO: 16925 - RNA, 25 nt, Artificial Sequence
  Synthetic Oligonucleotide
gagauucgcuuggagaaaccguaau

SEQ ID NO: 16926 - RNA, 25 nt, Artificial Sequence
  Synthetic Oligonucleotide
gagauucgcuuggagaaucaguaau

SEQ ID NO: 16927 - RNA, 25 nt, Artificial Sequence
  Synthetic Oligonucleotide
gagauucgcuuggagaggcaguaau

SEQ ID NO: 16928 - RNA, 25 nt, Artificial Sequence
  Synthetic Oligonucleotide
gagauucgcuuggagaggcagugau

SEQ ID NO: 16929 - RNA, 25 nt, Artificial Sequence
  Synthetic Oligonucleotide
gagauucgcuuggagaggcggugau

SEQ ID NO: 16930 - RNA, 25 nt, Artificial Sequence
  Synthetic Oligonucleotide
gagauucgcuuggagaugcaguaau

SEQ ID NO: 16931 - RNA, 25 nt, Artificial Sequence
  Synthetic Oligonucleotide
gagauucgcuuggaggagcaguaau

SEQ ID NO: 16932 - RNA, 25 nt, Artificial Sequence
  Synthetic Oligonucleotide
gagauucgcuuggaaaagcaguaau

SEQ ID NO: 16933 - RNA, 25 nt, Artificial Sequence
  Synthetic Oligonucleotide
gagauucgcuuggggaagcaguaau

SEQ ID NO: 16934 - RNA, 25 nt, Artificial Sequence
  Synthetic Oligonucleotide
gagauucgcuuggggaagcagugau

SEQ ID NO: 16935 - RNA, 25 nt, Artificial Sequence
  Synthetic Oligonucleotide
gagauucgcuuggggaagcwwuaau

SEQ ID NO: 16936 - RNA, 25 nt, Artificial Sequence
  Synthetic Oligonucleotide
gagauucgcuuggwgaagcagucau

SEQ ID NO: 16937 - RNA, 25 nt, Artificial Sequence
  Synthetic Oligonucleotide
gagauucgcuugaagaagcaguaau

SEQ ID NO: 16938 - RNA, 25 nt, Artificial Sequence
  Synthetic Oligonucleotide
gagauucgcuuagagaagcaguaau

SEQ ID NO: 16939 - RNA, 25 nt, Artificial Sequence
  Synthetic Oligonucleotide
gagauucgcuuwgagaagcaguaau

SEQ ID NO: 16940 - RNA, 25 nt, Artificial Sequence
  Synthetic Oligonucleotide
gagauucacuuggagaagcaguaau

SEQ ID NO: 16941 - RNA, 25 nt, Artificial Sequence
  Synthetic Oligonucleotide
gagauucacuuggagaagcagugau

SEQ ID NO: 16942 - RNA, 25 nt, Artificial Sequence
  Synthetic Oligonucleotide
gagauucucuuggagaagcaguaau

SEQ ID NO: 16943 - RNA, 25 nt, Artificial Sequence
  Synthetic Oligonucleotide
gagauuugcuuggagaagcaguaau

SEQ ID NO: 16944 - RNA, 25 nt, Artificial Sequence
  Synthetic Oligonucleotide
gagauacgcuuggagaagcagugau

SEQ ID NO: 16945 - RNA, 25 nt, Artificial Sequence
  Synthetic Oligonucleotide
aagauucgcuuggagaagcaguaau

SEQ ID NO: 16946 - RNA, 25 nt, Artificial Sequence
  Synthetic Oligonucleotide
gagauucgcuuggggaugcaguaau

SEQ ID NO: 16947 - RNA, 25 nt, Artificial Sequence
  Synthetic Oligonucleotide
gagauucgcuuggugaaacaguaau

SEQ ID NO: 16948 - RNA, 25 nt, Artificial Sequence
  Synthetic Oligonucleotide
gaaauucgcuuggagacgcaguaau

SEQ ID NO: 16949 - RNA, 25 nt, Artificial Sequence
  Synthetic Oligonucleotide
aagauucgcuuggggaagcaguaau

SEQ ID NO: 16950 - DNA, 36 bp, Artificial Sequence
  Synthetic Oligonucleotide
cyrgrgrarrcrrrarrrrcrrrcrgrgrargdtdt

SEQ ID NO: 16951 - DNA, 36 bp, Artificial Sequence; identical to SEQ ID NO: 16950
  Synthetic Oligonucleotide

SEQ ID NO: 16952 - DNA, 48 bp, Artificial Sequence
  Synthetic Oligonucleotide
rargrarcrargrcrgrarcrcrarararargrararrrcrgrgdadt

SEQ ID NO: 16953 - DNA, 48 bp, Artificial Sequence; identical to SEQ ID NO: 16952
  Synthetic Oligonucleotide

SEQ ID NO: 16954 - RNA, 50 nt, Artificial Sequence
  Synthetic Oligonucleotide
rarurgrarargrarurcrurgrururcrcrarcrcrarururgradadg

SEQ ID NO: 16955 - RNA, 50 nt, Artificial Sequence; identical to SEQ ID NO: 16954
  Synthetic Oligonucleotide

SEQ ID NO: 16956 - DNA, 44 bp, Artificial Sequence
  Synthetic Oligonucleotide
rgrarrcrrgrrrcrcrarcrcrarrrgrarargrararcdtdc

SEQ ID NO: 16957 - DNA, 44 bp, Artificial Sequence; identical to SEQ ID NO: 16956
  Synthetic Oligonucleotide

SEQ ID NO: 16958 - RNA, 50 nt, Artificial Sequence
  Synthetic Oligonucleotide
rururgrargrgrargrurgrcrcrurgrarururararurgrarudcdc

SEQ ID NO: 16959 - RNA, 50 nt, Artificial Sequence; identical to SEQ ID NO: 16958
  Synthetic Oligonucleotide

SEQ ID NO: 16960 - DNA, 34 bp, Artificial Sequence
  Synthetic Oligonucleotide
rgrgrcrrcrrrarrrrcrrrcrgrgrargdtdt

SEQ ID NO: 16961 - DNA, 35 bp, Artificial Sequence
  Synthetic Oligonucleotide
rgrgrarrcrcrrarrrrcrrrcrgrgrargdtdt

SEQ ID NO: 16962 - DNA, 35 bp, Artificial Sequence
  Synthetic Oligonucleotide
rgrgrarrcrrrarcrrrcrrrcrgrgrargdtdt

SEQ ID NO: 16963 - DNA, 34 bp, Artificial Sequence
  Synthetic Oligonucleotide
rgrgrarrcrrrarrrrcrrrcrgrgrargdtdt

SEQ ID NO: 16964 - DNA, 34 bp, Artificial Sequence; identical to SEQ ID NO: 16963
  Synthetic Oligonucleotide

SEQ ID NO: 16965 - DNA, 34 bp, Artificial Sequence; identical to SEQ ID NO: 16963
  Synthetic Oligonucleotide

SEQ ID NO: 16966 - DNA, 34 bp, Artificial Sequence; identical to SEQ ID NO: 16963
  Synthetic Oligonucleotide

SEQ ID NO: 16967 - DNA, 34 bp, Artificial Sequence; identical to SEQ ID NO: 16963
  Synthetic Oligonucleotide

SEQ ID NO: 16968 - DNA, 34 bp, Artificial Sequence; identical to SEQ ID NO: 16963
  Synthetic Oligonucleotide

SEQ ID NO: 16969 - DNA, 34 bp, Artificial Sequence; identical to SEQ ID NO: 16963
  Synthetic Oligonucleotide

SEQ ID NO: 16970 - DNA, 34 bp, Artificial Sequence
  Synthetic Oligonucleotide
rgrgrarrcrrrarrrrcrrrcrgrgrcrgdtdt

SEQ ID NO: 16971 - DNA, 34 bp, Artificial Sequence
  Synthetic Oligonucleotide
rgrarrcrrrarrrrcrrrcrgrgrargradtdt

SEQ ID NO: 16972 - DNA, 34 bp, Artificial Sequence; identical to SEQ ID NO: 16971
  Synthetic Oligonucleotide

SEQ ID NO: 16973 - DNA, 34 bp, Artificial Sequence; identical to SEQ ID NO: 16971
  Synthetic Oligonucleotide

SEQ ID NO: 16974 - DNA, 34 bp, Artificial Sequence; identical to SEQ ID NO: 16971
  Synthetic Oligonucleotide

SEQ ID NO: 16975 - DNA, 34 bp, Artificial Sequence; identical to SEQ ID NO: 16971
  Synthetic Oligonucleotide

SEQ ID NO: 16976 - DNA, 34 bp, Artificial Sequence; identical to SEQ ID NO: 16971
  Synthetic Oligonucleotide

SEQ ID NO: 16977 - DNA, 34 bp, Artificial Sequence; identical to SEQ ID NO: 16971
  Synthetic Oligonucleotide

SEQ ID NO: 16978 - DNA, 34 bp, Artificial Sequence
  Synthetic Oligonucleotide
rgrcrrcrrrarrrrcrrrcrgrgrargradtdt

SEQ ID NO: 16979 - DNA, 35 bp, Artificial Sequence
  Synthetic Oligonucleotide
rgrarrcrcrrarrrrcrrrcrgrgrargradtdt

SEQ ID NO: 16980 - DNA, 35 bp, Artificial Sequence
  Synthetic Oligonucleotide
rgrarrcrrrarcrrrcrrrcrgrgrargradtdt

SEQ ID NO: 16981 - DNA, 34 bp, Artificial Sequence
  Synthetic Oligonucleotide
rgrarrcrrrarrrrcrrrcrgrgrcrgradtdt

SEQ ID NO: 16982 - DNA, 40 bp, Artificial Sequence
  Synthetic Oligonucleotide
rgrarrcrrrarrrrcrrrcrgrgrargrarcraradtdg

SEQ ID NO: 16983 - DNA, 38 bp, Artificial Sequence
  Synthetic Oligonucleotide
rarrcrrrarrrrcrrrcrgrgrargrarcraradtdg

SEQ ID NO: 16984 - DNA, 42 bp, Artificial Sequence
  Synthetic Oligonucleotide
rgrgrarrcrrrarrrrcrrrcrgrgrargrarcraradtdg

SEQ ID NO: 16985 - DNA, 42 bp, Artificial Sequence; identical to SEQ ID NO: 16984
  Synthetic Oligonucleotide

SEQ ID NO: 16986 - DNA, 42 bp, Artificial Sequence; identical to SEQ ID NO: 16984
  Synthetic Oligonucleotide

SEQ ID NO: 16987 - DNA, 42 bp, Artificial Sequence; identical to SEQ ID NO: 16984
  Synthetic Oligonucleotide

SEQ ID NO: 16988 - DNA, 42 bp, Artificial Sequence; identical to SEQ ID NO: 16984
  Synthetic Oligonucleotide

SEQ ID NO: 16989 - DNA, 42 bp, Artificial Sequence; identical to SEQ ID NO: 16984
  Synthetic Oligonucleotide

SEQ ID NO: 16990 - DNA, 36 bp, Artificial Sequence
  Synthetic Oligonucleotide
rgrarrcrrgrrrcrcrarcrcrarrrgraradtdt

SEQ ID NO: 16991 - DNA, 37 bp, Artificial Sequence
  Synthetic Oligonucleotide
rarrgrarargrarrcrrgrrrcrcrarcrcradtdt

SEQ ID NO: 16992 - DNA, 38 bp, Artificial Sequence
  Synthetic Oligonucleotide
rgrcrararrrgrargrgrargrrgrcrcrrgradtdt

SEQ ID NO: 16993 - DNA, 36 bp, Artificial Sequence
  Synthetic Oligonucleotide
rrrgrargrgrargrrgrcrcrrgrarrraradtdt

SEQ ID NO: 16994 - DNA, 37 bp, Artificial Sequence
  Synthetic Oligonucleotide
rcrgrgrgrarcrrcrrargrcrarrarcrrradtdt

SEQ ID NO: 16995 - DNA, 41 bp, Artificial Sequence
  Synthetic Oligonucleotide
rarcrrgrarcrargrcrcrargrarcrargrcrgradtdt

SEQ ID NO: 16996 - DNA, 41 bp, Artificial Sequence
  Synthetic Oligonucleotide
rargrarcrargrcrgrarcrcrarararargrarardtdt

SEQ ID NO: 16997 - DNA, 42 bp, Artificial Sequence
  Synthetic Oligonucleotide
rgrgrartrcrtrtrartrtrtrcrtrtrcrgrgrargdtdt

SEQ ID NO: 16998 - DNA, 44 bp, Artificial Sequence
  Synthetic Oligonucleotide
cyrgrgrarrcrrrarrrrcrrrcrgrgrargrarcraradtdg

SEQ ID NO: 16999 - DNA, 42 bp, Artificial Sequence
  Synthetic Oligonucleotide
rgrgrarrcrrrarrrrcrrrcrgrgrargrarcrarartdg

SEQ ID NO: 17000 - DNA, 42 bp, Artificial Sequence
  Synthetic Oligonucleotide
rgrgrarrcrrrarrrrcrrrcrgrgrargrarcrarartrt

SEQ ID NO: 17001 - DNA, 50 bp, Artificial Sequence
  Synthetic Oligonucleotide
rgrgrartrcrtrtrartrtrtrcrtrtrcrgrgrargrarcrarartdg

SEQ ID NO: 17002 - DNA, 42 bp, Artificial Sequence
  Synthetic Oligonucleotide
rgmgmarrcrrrarrrrcrrrcrgrgrargrarcraradtdg

SEQ ID NO: 17003 - DNA, 42 bp, Artificial Sequence; identical to SEQ ID NO: 17002
  Synthetic Oligonucleotide

SEQ ID NO: 17004 - RNA, 50 nt, Artificial Sequence
  Synthetic Oligonucleotide
rgrgrarurcrururarurururcrururcrgrgrargrarcraramumg

SEQ ID NO: 17005 - DNA, 42 bp, Artificial Sequence
  Synthetic Oligonucleotide
rgrgrarrcrrrarrrrcrrrcrgrgrargrarcmamadtdg

SEQ ID NO: 17006 - DNA, 50 bp, Artificial Sequence
  Synthetic Oligonucleotide
rgrgrartrcrtrtrartrtrtrcrtrtrcrgrgrargrarcraradtdg

SEQ ID NO: 17007 - DNA, 50 bp, Artificial Sequence; identical to SEQ ID NO: 17006
  Synthetic Oligonucleotide

SEQ ID NO: 17008 - DNA, 39 bp, Artificial Sequence
  Synthetic Oligonucleotide
rcrrcrcrgrarargrarararrarargrarcrcrdtdt

SEQ ID NO: 17009 - DNA, 39 bp, Artificial Sequence
  Synthetic Oligonucleotide
rcrrcrcrgrarargrarararrarargrarrcrcdtdt

SEQ ID NO: 17010 - DNA, 43 bp, Artificial Sequence
  Synthetic Oligonucleotide
rarrcrcrgrararrrcrrrrrgrgrrcrgrcrrgrrcrdtdt

SEQ ID NO: 17011 - RNA, 54 nt, Artificial Sequence
  Synthetic Oligonucleotide
rarurcrcrgrararururcrururururgrgrurcrgrcrurgrurcrururu

SEQ ID NO: 17012 - DNA, 46 bp, Artificial Sequence
  Synthetic Oligonucleotide
rcrrrcrararrgrgrrgrgrararcrargrarrcrrrcrardtdt

SEQ ID NO: 17013 - RNA, 54 nt, Artificial Sequence
  Synthetic Oligonucleotide
rcrururcrararurgrgrurgrgrararcrargrarurcrururcrarururu

SEQ ID NO: 17014 - DNA, 47 bp, Artificial Sequence
  Synthetic Oligonucleotide
rgrargrrrcrrrcrararrgrgrrgrgrararcrargrarrcdtdt

SEQ ID NO: 17015 - RNA, 54 nt, Artificial Sequence
  Synthetic Oligonucleotide
rgrargrururcrururcrararurgrgrurgrgrararcrargrarurcruru

SEQ ID NO: 17016 - DNA, 48 bp, Artificial Sequence
  Synthetic Oligonucleotide
rgrgrarrcrarrrararrcrargrgrcrarcrrcrcrrcraradtdt

SEQ ID NO: 17017 - RNA, 54 nt, Artificial Sequence
  Synthetic Oligonucleotide
rgrgrarurcrarururararurcrargrgrcrarcrurcrcrurcrararuru

SEQ ID NO: 17018 - DNA, 40 bp, Artificial Sequence
  Synthetic Oligonucleotide
rcrrcrcrgrarargrarararrarargrarwrcrcdtdt

SEQ ID NO: 17019 - DNA, 39 bp, Artificial Sequence
  Synthetic Oligonucleotide
rcrrcrcrgrarargrarararrarwrgrarrcrcdtdt

SEQ ID NO: 17020 - DNA, 39 bp, Artificial Sequence
  Synthetic Oligonucleotide
rcrrcrcrgrarargrararwrrarargrarrcrcdtdt

SEQ ID NO: 17021 - DNA, 39 bp, Artificial Sequence; identical to SEQ ID NO: 17009
  Synthetic Oligonucleotide

SEQ ID NO: 17022 - DNA, 39 bp, Artificial Sequence
  Synthetic Oligonucleotide
rcrrcrcrgrararwrarararrarargrarrcrcdtdt

SEQ ID NO: 17023 - DNA, 39 bp, Artificial Sequence
  Synthetic Oligonucleotide
rcrrcrcrwrarargrarararrarargrarrcrcdtdt

SEQ ID NO: 17024 - DNA, 40 bp, Artificial Sequence; identical to SEQ ID NO: 17018
  Synthetic Oligonucleotide

SEQ ID NO: 17025 - DNA, 39 bp, Artificial Sequence; identical to SEQ ID NO: 17019
  Synthetic Oligonucleotide

SEQ ID NO: 17026 - DNA, 39 bp, Artificial Sequence; identical to SEQ ID NO: 17020
  Synthetic Oligonucleotide

SEQ ID NO: 17027 - DNA, 40 bp, Artificial Sequence
  Synthetic Oligonucleotide
rcrwrcrcrgrarargrarararrarargrarrcrcdtdt

SEQ ID NO: 17028 - DNA, 40 bp, Artificial Sequence; identical to SEQ ID NO: 17027
  Synthetic Oligonucleotide

SEQ ID NO: 17029 - DNA, 38 bp, Artificial Sequence
  Synthetic Oligonucleotide
rrcrrcrcrgrarargrarararrarargrarrcdtdt

SEQ ID NO: 17030 - DNA, 38 bp, Artificial Sequence
  Synthetic Oligonucleotide
rrcrrcrcrgrararwrarararrarargrarrcdtdt

SEQ ID NO: 17031 - DNA, 38 bp, Artificial Sequence
  Synthetic Oligonucleotide
rrcrrcrcrwrarargrarararrarargrarrcdtdt

SEQ ID NO: 17032 - DNA, 39 bp, Artificial Sequence
  Synthetic Oligonucleotide
rrcrrcrcrgrarargrarararrarargrarwrcdtdt

SEQ ID NO: 17033 - DNA, 38 bp, Artificial Sequence
  Synthetic Oligonucleotide
rrcrrcrcrgrarargrarararrarwrgrarrcdtdt

SEQ ID NO: 17034 - DNA, 38 bp, Artificial Sequence
  Synthetic Oligonucleotide
rrcrrcrcrgrarargrararwrrarargrarrcdtdt

SEQ ID NO: 17035 - DNA, 39 bp, Artificial Sequence
  Synthetic Oligonucleotide
rrcrwrcrcrgrarargrarararrarargrarrcdtdt

SEQ ID NO: 17036 - DNA, 39 bp, Artificial Sequence; identical to SEQ ID NO: 17032
  Synthetic Oligonucleotide

SEQ ID NO: 17037 - DNA, 38 bp, Artificial Sequence; identical to SEQ ID NO: 17033
  Synthetic Oligonucleotide

SEQ ID NO: 17038 - DNA, 38 bp, Artificial Sequence; identical to SEQ ID NO: 17034
  Synthetic Oligonucleotide

SEQ ID NO: 17039 - DNA, 39 bp, Artificial Sequence; identical to SEQ ID NO: 17035
  Synthetic Oligonucleotide

SEQ ID NO: 17040 - RNA, 54 nt, Artificial Sequence
  Synthetic Oligonucleotide
rcrarururgrurcrurcrcrgrarargrarararurarargrarurcrcruru

SEQ ID NO: 17041 - RNA, 54 nt, Artificial Sequence; identical to SEQ ID NO: 17040
  Synthetic Oligonucleotide

SEQ ID NO: 17042 - DNA, 48 bp, Artificial Sequence
  Synthetic Oligonucleotide
rcrarrrgrrcrrcrcrgrarargrarararrarargrarrcrcdtdt

SEQ ID NO: 17043 - RNA, 54 nt, Artificial Sequence; identical to SEQ ID NO: 17040
  Synthetic Oligonucleotide

SEQ ID NO: 17044 - DNA, 48 bp, Artificial Sequence
  Synthetic Oligonucleotide
rcrarrrgrrcrrcrcrgrarargrarararrarargrarrcrcrtrt

SEQ ID NO: 17045 - RNA, 52 nt, Artificial Sequence
  Synthetic Oligonucleotide
rarururgrurcrurcrcrgrarargrarararurarargrarurcrcruru

SEQ ID NO: 17046 - RNA, 50 nt, Artificial Sequence
  Synthetic Oligonucleotide
rururgrurcrurcrcrgrarargrarararurarargrarurcrcruru

SEQ ID NO: 17047 - RNA, 54 nt, Artificial Sequence
  Synthetic Oligonucleotide
rcrarururgrurcrurcrcrgrarargrarararurarargrarumcmcruru

SEQ ID NO: 17048 - DNA, 37 bp, Artificial Sequence
  Synthetic Oligonucleotide
rrrcrararrgrgrrgrgrararcrargrarrcdtdt

SEQ ID NO: 17049 - DNA, 36 bp, Artificial Sequence
  Synthetic Oligonucleotide
rrgrgrrgrgrararcrargrarrcrrrcrardtdt

SEQ ID NO: 17050 - DNA, 37 bp, Artificial Sequence
  Synthetic Oligonucleotide
rrcrargrgrcrarcrrcrcrrcrararrrgrcdtdt

SEQ ID NO: 17051 - DNA, 37 bp, Artificial Sequence
  Synthetic Oligonucleotide
rrrararrcrargrgrcrarcrrcrcrrcraradtdt

SEQ ID NO: 17052 - DNA, 37 bp, Artificial Sequence
  Synthetic Oligonucleotide
rrarargrrarrgrcrrargrargrrcrcrcrgdtdt

SEQ ID NO: 17053 - DNA, 35 bp, Artificial Sequence
  Synthetic Oligonucleotide
rrcrgrcrrgrrcrrgrgrcrrgrrcrargrdtdt

SEQ ID NO: 17054 - DNA, 32 bp, Artificial Sequence
  Synthetic Oligonucleotide
rarrrcrrrrrgrgrrcrgrcrrgrrcrdtdt

SEQ ID NO: 17055 - DNA, 42 bp, Artificial Sequence
  Synthetic Oligonucleotide
rcrtrcrcrgrarargrararartrarargrartrcrcdtdt

SEQ ID NO: 17056 - RNA, 54 nt, Artificial Sequence; identical to SEQ ID NO: 17040
  Synthetic Oligonucleotide

SEQ ID NO: 17057 - RNA, 54 nt, Artificial Sequence; identical to SEQ ID NO: 17040
  Synthetic Oligonucleotide

SEQ ID NO: 17058 - RNA, 54 nt, Artificial Sequence
  Synthetic Oligonucleotide
rararururgrurcrurcrcrgrarargrarararurarargrarurcrcruru

SEQ ID NO: 17059 - DNA, 52 bp, Artificial Sequence
  Synthetic Oligonucleotide
rcrartrtrgrtrcrtrcrcrgrarargrararartrarargrartrcrcrr

SEQ ID NO: 17060 - RNA, 54 nt, Artificial Sequence; identical to SEQ ID NO: 17047
  Synthetic Oligonucleotide

SEQ ID NO: 17061 - RNA, 54 nt, Artificial Sequence; identical to SEQ ID NO: 17040
  Synthetic Oligonucleotide

SEQ ID NO: 17062 - RNA, 54 nt, Artificial Sequence; identical to SEQ ID NO: 17040
  Synthetic Oligonucleotide

SEQ ID NO: 17063 - RNA, 54 nt, Artificial Sequence; identical to SEQ ID NO: 17040
  Synthetic Oligonucleotide

SEQ ID NO: 17064 - DNA, 54 bp, Artificial Sequence
  Synthetic Oligonucleotide
rcrartrtrgrtrcrtrcrcrgrarargrararartrarargrartrcrcrtrt

SEQ ID NO: 17065 - DNA, 52 bp, Artificial Sequence; identical to SEQ ID NO: 17059
  Synthetic Oligonucleotide

SEQ ID NO: 17066 - RNA, 19 nt, Artificial Sequence
  Synthetic Oligonucleotide
agacagcgaccaaaagaau

SEQ ID NO: 17067 - RNA, 19 nt, Artificial Sequence
  Synthetic Oligonucleotide
agacagcgaccaaaaggau

SEQ ID NO: 17068 - RNA, 19 nt, Artificial Sequence
  Synthetic Oligonucleotide
agacagcgaccaaaggaau

SEQ ID NO: 17069 - RNA, 19 nt, Artificial Sequence
  Synthetic Oligonucleotide
agacagcgaccaaaagauu

SEQ ID NO: 17070 - RNA, 19 nt, Artificial Sequence
  Synthetic Oligonucleotide
agacgacgaucaaaagaau

SEQ ID NO: 17071 - RNA, 19 nt, Artificial Sequence
  Synthetic Oligonucleotide
acugacagccagacagcga

SEQ ID NO: 17072 - RNA, 19 nt, Artificial Sequence
  Synthetic Oligonucleotide
acugacagucagacagcga

SEQ ID NO: 17073 - RNA, 19 nt, Artificial Sequence
  Synthetic Oligonucleotide
acugauagccagacagcga

SEQ ID NO: 17074 - RNA, 19 nt, Artificial Sequence
  Synthetic Oligonucleotide
accgacagccagacagcga

SEQ ID NO: 17075 - RNA, 19 nt, Artificial Sequence
  Synthetic Oligonucleotide
acugacagccagacgacga

SEQ ID NO: 17076 - RNA, 19 nt, Artificial Sequence
  Synthetic Oligonucleotide
cgggacucuagcauacuua

SEQ ID NO: 17077 - RNA, 19 nt, Artificial Sequence
  Synthetic Oligonucleotide
cgggacucuagcaugcuua

SEQ ID NO: 17078 - RNA, 19 nt, Artificial Sequence
  Synthetic Oligonucleotide
cgggacuuuagcauacuua

SEQ ID NO: 17079 - RNA, 19 nt, Artificial Sequence
  Synthetic Oligonucleotide
agggacucuagcauacuua

SEQ ID NO: 17080 - RNA, 19 nt, Artificial Sequence
  Synthetic Oligonucleotide
cgagacucuagcauacuua

SEQ ID NO: 17081 - RNA, 19 nt, Artificial Sequence
  Synthetic Oligonucleotide
cggaacucuagcauacuua

SEQ ID NO: 17082 - RNA, 19 nt, Artificial Sequence
  Synthetic Oligonucleotide
cgggacuauagcauacuua

SEQ ID NO: 17083 - RNA, 19 nt, Artificial Sequence
  Synthetic Oligonucleotide
cgggacuccagcauacuua

SEQ ID NO: 17084 - RNA, 19 nt, Artificial Sequence
  Synthetic Oligonucleotide
cgggacucuaacauacuua

SEQ ID NO: 17085 - RNA, 19 nt, Artificial Sequence
  Synthetic Oligonucleotide
gaucuguuccaccauugaa

SEQ ID NO: 17086 - RNA, 19 nt, Artificial Sequence
  Synthetic Oligonucleotide
gaucuguuucaccauugaa

SEQ ID NO: 17087 - RNA, 19 nt, Artificial Sequence
  Synthetic Oligonucleotide
aaucuguuccaccauugaa

SEQ ID NO: 17088 - RNA, 19 nt, Artificial Sequence
  Synthetic Oligonucleotide
gaccuguuccaccauugaa

SEQ ID NO: 17089 - RNA, 19 nt, Artificial Sequence
  Synthetic Oligonucleotide
gaucugcuccaccauugaa

SEQ ID NO: 17090 - RNA, 19 nt, Artificial Sequence
  Synthetic Oligonucleotide
gaucuguuacaccauugaa

SEQ ID NO: 17091 - RNA, 19 nt, Artificial Sequence
  Synthetic Oligonucleotide
gaucuguuccaccauuaaa

SEQ ID NO: 17092 - RNA, 19 nt, Artificial Sequence
  Synthetic Oligonucleotide
gaccuguucuaccauugaa

SEQ ID NO: 17093 - RNA, 19 nt, Artificial Sequence
  Synthetic Oligonucleotide
gaccugcuccaccauugaa

SEQ ID NO: 17094 - RNA, 19 nt, Artificial Sequence
  Synthetic Oligonucleotide
augaagaucuguuccacca

SEQ ID NO: 17095 - RNA, 19 nt, Artificial Sequence
  Synthetic Oligonucleotide
augaagaucuguuucacca

SEQ ID NO: 17096 - RNA, 19 nt, Artificial Sequence
  Synthetic Oligonucleotide
augaggaucuguuccacca

SEQ ID NO: 17097 - RNA, 19 nt, Artificial Sequence
  Synthetic Oligonucleotide
acgaagaucuguuccacca

SEQ ID NO: 17098 - RNA, 19 nt, Artificial Sequence
  Synthetic Oligonucleotide
augaaaaucuguuccacca

SEQ ID NO: 17099 - RNA, 19 nt, Artificial Sequence
  Synthetic Oligonucleotide
augaagaccuguuccacca

SEQ ID NO: 17100 - RNA, 19 nt, Artificial Sequence
  Synthetic Oligonucleotide
augaagaucugcuccacca

SEQ ID NO: 17101 - RNA, 19 nt, Artificial Sequence
  Synthetic Oligonucleotide
augaagaucuguuacacca

SEQ ID NO: 17102 - RNA, 19 nt, Artificial Sequence
  Synthetic Oligonucleotide
cugaagaucuguuccacca

SEQ ID NO: 17103 - RNA, 19 nt, Artificial Sequence
  Synthetic Oligonucleotide
uugaagaucuguuccacca

SEQ ID NO: 17104 - RNA, 19 nt, Artificial Sequence
  Synthetic Oligonucleotide
augaagaccuguucuacca

SEQ ID NO: 17105 - RNA, 19 nt, Artificial Sequence
  Synthetic Oligonucleotide
auaaagaccuguuccacca

SEQ ID NO: 17106 - RNA, 19 nt, Artificial Sequence
  Synthetic Oligonucleotide
augaagaccugcuccacca

SEQ ID NO: 17107 - RNA, 19 nt, Artificial Sequence
  Synthetic Oligonucleotide
uugaggagugccugauuaa

SEQ ID NO: 17108 - RNA, 19 nt, Artificial Sequence
  Synthetic Oligonucleotide
uugaggagugccugguuaa

SEQ ID NO: 17109 - RNA, 19 nt, Artificial Sequence
  Synthetic Oligonucleotide
uugaggaaugccugauuaa

SEQ ID NO: 17110 - RNA, 19 nt, Artificial Sequence
  Synthetic Oligonucleotide
uugaggagugccuaauuaa

SEQ ID NO: 17111 - RNA, 19 nt, Artificial Sequence
  Synthetic Oligonucleotide
gcaauugaggagugccuga

SEQ ID NO: 17112 - RNA, 19 nt, Artificial Sequence
  Synthetic Oligonucleotide
gcaauugaggagugccugg

SEQ ID NO: 17113 - RNA, 19 nt, Artificial Sequence
  Synthetic Oligonucleotide
gcaguugaggagugccuga

SEQ ID NO: 17114 - RNA, 19 nt, Artificial Sequence
  Synthetic Oligonucleotide
gcaauugaggaaugccuga

SEQ ID NO: 17115 - RNA, 19 nt, Artificial Sequence
  Synthetic Oligonucleotide
gcaauugaggagugccuaa

SEQ ID NO: 17116 - RNA, 19 nt, Artificial Sequence
  Synthetic Oligonucleotide
gaucuuauuucuucggaga

SEQ ID NO: 17117 - RNA, 19 nt, Artificial Sequence
  Synthetic Oligonucleotide
gaucuuauuucuucgggga

SEQ ID NO: 17118 - RNA, 19 nt, Artificial Sequence
  Synthetic Oligonucleotide
gaucuuauuucuuuggaga

SEQ ID NO: 17119 - RNA, 19 nt, Artificial Sequence
  Synthetic Oligonucleotide
ggucuuauuucuucggaga

SEQ ID NO: 17120 - RNA, 19 nt, Artificial Sequence
  Synthetic Oligonucleotide
guucuuauuucuucggaga

SEQ ID NO: 17121 - RNA, 19 nt, Artificial Sequence
  Synthetic Oligonucleotide
ggaucuuauuucuucggag

SEQ ID NO: 17122 - RNA, 19 nt, Artificial Sequence
  Synthetic Oligonucleotide
ggaucuuauuucuucgggg

SEQ ID NO: 17123 - RNA, 19 nt, Artificial Sequence
  Synthetic Oligonucleotide
ggaucuuauuucuuuggag

SEQ ID NO: 17124 - RNA, 19 nt, Artificial Sequence
  Synthetic Oligonucleotide
gggucuuauuucuucggag

SEQ ID NO: 17125 - RNA, 19 nt, Artificial Sequence
  Synthetic Oligonucleotide
gguucuuauuucuucggag

SEQ ID NO: 17126 - DNA, 18 bp, Artificial Sequence
  Synthetic Oligonucleotide
ggagacggggggaadtdt

SEQ ID NO: 17127 - DNA, 19 bp, Artificial Sequence
  Synthetic Oligonucleotide
accaacaccacgcccdtdt

SEQ ID NO: 17128 - DNA, 18 bp, Artificial Sequence
  Synthetic Oligonucleotide
cgggaccagcaacadtdt

SEQ ID NO: 17129 - DNA, 18 bp, Artificial Sequence
  Synthetic Oligonucleotide
aagagcagagcccgdtdt

SEQ ID NO: 17130 - DNA, 19 bp, Artificial Sequence
  Synthetic Oligonucleotide
gcaggcaaaccagaadtdt

SEQ ID NO: 17131 - DNA, 16 bp, Artificial Sequence
  Synthetic Oligonucleotide
acaaagggccgcdtdt

SEQ ID NO: 17132 - DNA, 20 bp, Artificial Sequence
  Synthetic Oligonucleotide
caggaacaccaggaacdtdt

SEQ ID NO: 17133 - DNA, 16 bp, Artificial Sequence
  Synthetic Oligonucleotide
gaccagggaccgdtdt

SEQ ID NO: 17134 - DNA, 17 bp, Artificial Sequence
  Synthetic Oligonucleotide
gacgccaccagaadtdt

SEQ ID NO: 17135 - DNA, 18 bp, Artificial Sequence
  Synthetic Oligonucleotide
caaggggaacagacdtdt

SEQ ID NO: 17136 - DNA, 16 bp, Artificial Sequence
  Synthetic Oligonucleotide
gccaaccgagagdtdt

SEQ ID NO: 17137 - DNA, 19 bp, Artificial Sequence
  Synthetic Oligonucleotide
caacacggagaagcadtdt

SEQ ID NO: 17138 - DNA, 20 bp, Artificial Sequence
  Synthetic Oligonucleotide
cggcacagagggcaagdtdt

SEQ ID NO: 17139 - DNA, 18 bp, Artificial Sequence
  Synthetic Oligonucleotide
cgccccaagagccgdtdt

SEQ ID NO: 17140 - DNA, 19 bp, Artificial Sequence
  Synthetic Oligonucleotide
gcaagaggaggccgadtdt

SEQ ID NO: 17141 - DNA, 18 bp, Artificial Sequence
  Synthetic Oligonucleotide
caggcaccccaagcdtdt

SEQ ID NO: 17142 - DNA, 14 bp, Artificial Sequence
  Synthetic Oligonucleotide
gacccggggcdtdt

SEQ ID NO: 17143 - DNA, 22 bp, Artificial Sequence
  Synthetic Oligonucleotide
aagcaaaacccagggacadtdt

SEQ ID NO: 17144 - DNA, 15 bp, Artificial Sequence
  Synthetic Oligonucleotide
gccggcaacccdtdt

SEQ ID NO: 17145 - DNA, 21 bp, Artificial Sequence
  Synthetic Oligonucleotide
ggaggaaccaagaagcadtdt

SEQ ID NO: 17146 - DNA, 18 bp, Artificial Sequence
  Synthetic Oligonucleotide
agagagaagggcccdtdt

SEQ ID NO: 17147 - DNA, 18 bp, Artificial Sequence
  Synthetic Oligonucleotide
gagagcaccacccadtdt

SEQ ID NO: 17148 - DNA, 20 bp, Artificial Sequence
  Synthetic Oligonucleotide
aaggcgaacggcgccadtdt

SEQ ID NO: 17149 - DNA, 18 bp, Artificial Sequence
  Synthetic Oligonucleotide
ggcgccagacgccadtdt

SEQ ID NO: 17150 - DNA, 15 bp, Artificial Sequence
  Synthetic Oligonucleotide
ggacaccggagdtdt

SEQ ID NO: 17151 - DNA, 20 bp, Artificial Sequence
  Synthetic Oligonucleotide
cccgaagaaaaagaccdtdt

SEQ ID NO: 17152 - DNA, 16 bp, Artificial Sequence
  Synthetic Oligonucleotide
ggacaccggagadtdt

SEQ ID NO: 17153 - DNA, 20 bp, Artificial Sequence
  Synthetic Oligonucleotide
cccgaagaaaaagaccdtdt

SEQ ID NO: 17154 - DNA, 20 bp, Artificial Sequence
  Synthetic Oligonucleotide
ccgaggcgaaacgacgdtdt

SEQ ID NO: 17155 - DNA, 18 bp, Artificial Sequence
  Synthetic Oligonucleotide
acgacgcgacccggdtdt

SEQ ID NO: 17156 - DNA, 19 bp, Artificial Sequence
  Synthetic Oligonucleotide
cagagcgaccccagcdtdt

SEQ ID NO: 17157 - DNA, 19 bp, Artificial Sequence
  Synthetic Oligonucleotide
gcgggagcagcaacgdtdt

SEQ ID NO: 17158 - DNA, 19 bp, Artificial Sequence
  Synthetic Oligonucleotide
ggcggacgaggagcadtdt

SEQ ID NO: 17159 - DNA, 19 bp, Artificial Sequence
  Synthetic Oligonucleotide
gccaccgaccagccadtdt

SEQ ID NO: 17160 - DNA, 21 bp, Artificial Sequence
  Synthetic Oligonucleotide
gaaacgaaaggaacagcdtdt

SEQ ID NO: 17161 - DNA, 14 bp, Artificial Sequence
  Synthetic Oligonucleotide
gcgcccgaacdtdt

SEQ ID NO: 17162 - DNA, 20 bp, Artificial Sequence
  Synthetic Oligonucleotide
cggccgccgagacagadadt

SEQ ID NO: 17163 - DNA, 19 bp, Artificial Sequence
  Synthetic Oligonucleotide
cgaccggcgaagccgdadt

SEQ ID NO: 17164 - DNA, 19 bp, Artificial Sequence
  Synthetic Oligonucleotide
gccccgagaggacccdtdt

SEQ ID NO: 17165 - DNA, 20 bp, Artificial Sequence
  Synthetic Oligonucleotide
ggagcccacggaggacdtdt

SEQ ID NO: 17166 - DNA, 18 bp, Artificial Sequence
  Synthetic Oligonucleotide
gaaacacagcgagcdtdt

SEQ ID NO: 17167 - DNA, 17 bp, Artificial Sequence
  Synthetic Oligonucleotide
gaccgaacggacadtdt

SEQ ID NO: 17168 - RNA, 21 nt, Artificial Sequence
  Synthetic Oligonucleotide
ggcuacguccaggagcgcauu

SEQ ID NO: 17169 - RNA, 21 nt, Artificial Sequence
  Synthetic Oligonucleotide
ugcgcuccuggacguagccuu

SEQ ID NO: 17170 - DNA, 18 bp, Artificial Sequence
  Synthetic Primer
tttttttttttttttttt

SEQ ID NO: 17171 - DNA, 22 bp, Artificial Sequence
  Synthetic Primer
ctcgtcgcttatgacaaagaag

SEQ ID NO: 17172 - DNA, 36 bp, Artificial Sequence
  Synthetic Primer
atatcgtctcgtattagtagaaacaagggtattttt

SEQ ID NO: 17173 - DNA, 21 bp, Artificial Sequence
  Synthetic Primer
caggacatactgatgaggatg

SEQ ID NO: 17174 - DNA, 35 bp, Artificial Sequence
  Synthetic Primer
atatcgtctcgtattagtagaaacaagggtgtttt

SEQ ID NO: 17175 - DNA, 21 bp, Artificial Sequence
  Synthetic Primer
agatcatcatgtgagtcagac

SEQ ID NO: 17176 - DNA, 21 bp, Artificial Sequence
  Synthetic Primer
gtttcagagactcgaactgtg

SEQ ID NO: 17177 - DNA, 24 bp, Artificial Sequence
  Synthetic Primer
cgctcagacatgagaacagaatgg

SEQ ID NO: 17178 - DNA, 36 bp, Artificial Sequence
  Synthetic Primer
atatcgtctcgtattagtagaaacaaggtagttttt

SEQ ID NO: 17179 - DNA, 23 bp, Artificial Sequence
  Synthetic Primer
taactagcctgactagcaacctc

SEQ ID NO: 17180 - DNA, 25 bp, Artificial Sequence
  Synthetic Primer
gtgcagaaatcagcccgaatggttc

SEQ ID NO: 17181 - DNA, 33 bp, Artificial Sequence
  Synthetic Primer
atatcgtctcgtattagtagaaacaaggcattt

SEQ ID NO: 17182 - DNA, 24 bp, Artificial Sequence
  Synthetic Primer
gcgaaaggagagaaggctaatgtg

SEQ ID NO: 17183 - DNA, 34 bp, Artificial Sequence
  Synthetic Primer
atatggtctcgtattagtagaaacaaggtcgttt

SEQ ID NO: 17184 - DNA, 25 bp, Artificial Sequence
  Synthetic Primer
gcttcttatcgttcaggctcttagg

SEQ ID NO: 17185 - DNA, 33 bp, Artificial Sequence
  Synthetic Primer
atatcgtctcgtattagtagaaacaaggtactt

SEQ ID NO: 17186 - DNA, 24 bp, Artificial Sequence
  Synthetic Primer
cggattgatgcacggattgatttc

SEQ ID NO: 17187 - DNA, 27 bp, Artificial Sequence
  Synthetic Primer
gacgtctgagctcttcaatggtggaac

SEQ ID NO: 17188 - DNA, 24 bp, Artificial Sequence
  Synthetic Primer
aatcgctgtctggctgtcagtaag

SEQ ID NO: 17189 - DNA, 25 bp, Artificial Sequence
  Synthetic Primer
ccgagaagcattaagcaaaacccag

SEQ ID NO: 17190 - DNA, 20 bp, Artificial Sequence
  Synthetic Primer
tctgtcagggttggaaagtc

SEQ ID NO: 17191 - DNA, 20 bp, Artificial Sequence
  Synthetic Primer
aaatgcaaaccgcttccaac

SEQ ID NO: 17192 - DNA, 57 bp, Artificial Sequence
  Synthetic Oligonucleotide
tggatcttatttcttcggagattcaagagatctccgaagaaataagatccttttttc

SEQ ID NO: 17193 - DNA, 61 bp, Artificial Sequence
  Synthetic Oligonucleotide
tcgagaaaaaaggatcttatttcttcggagatctcttgaatctccgaagaaataagatcca

SEQ ID NO: 17194 - DNA, 55 bp, Artificial Sequence
  Synthetic Oligonucleotide
tgatctgttccaccattgaattcaagagattcaatggtggaacagatcttttttc

SEQ ID NO: 17195 - DNA, 59 bp, Artificial Sequence
  Synthetic Oligonucleotide
tcgagaaaaaagatctgttccaccattgaatctcttgaattcaatggtggaacagatca

SEQ ID NO: 17196 - DNA, 56 bp, Artificial Sequence
  Synthetic Oligonucleotide
tgcgataatataactgcaagattcaagagatcttgcagttatattatcgttttttc

SEQ ID NO: 17197 - DNA, 60 bp, Artificial Sequence
  Synthetic Oligonucleotide
tcgagaaaaaacgataatataactgcaagatctcttgaatcttgcagttatattatcgca

SEQ ID NO: 17198 - DNA, 19 bp, Artificial Sequence
  Synthetic Oligonucleotide
cgataatataactgcaaga

SEQ ID NO: 17199 - DNA, 19 bp, Artificial Sequence
  Synthetic Oligonucleotide
tcttgcagttatattatcg

SEQ ID NO: 17200 - DNA, 55 bp, Artificial Sequence
  Synthetic Oligonucleotide
tgcaattgaggagtgcctgattcaagagatcaggcactcctcaattgcttttttc

SEQ ID NO: 17201 - DNA, 59 bp, Artificial Sequence
  Synthetic Oligonucleotide
tcgagaaaaaagcaattgaggagtgcctgatctcttgaatcaggcactcctcaattgca

SEQ ID NO: 17202 - RNA, 19 nt, Artificial Sequence
  Synthetic Oligonucleotide
agcaaaagcaggguagaua

SEQ ID NO: 17203 - RNA, 19 nt, Artificial Sequence
  Synthetic Oligonucleotide
gcaaaagcaggguagauaa

SEQ ID NO: 17204 - RNA, 19 nt, Artificial Sequence
  Synthetic Oligonucleotide
caaaagcaggguagauaau

SEQ ID NO: 17205 - RNA, 19 nt, Artificial Sequence
  Synthetic Oligonucleotide
aaaagcaggguagauaauc

SEQ ID NO: 17206 - RNA, 19 nt, Artificial Sequence
  Synthetic Oligonucleotide
aaagcaggguagauaauca

SEQ ID NO: 17207 - RNA, 19 nt, Artificial Sequence
  Synthetic Oligonucleotide
aagcaggguagauaaucac

SEQ ID NO: 17208 - DNA, 24 bp, Artificial Sequence
  Synthetic Oligonucleotide
gmgamcmmammcmcmggmagdtdt

SEQ ID NO: 17209 - DNA, 30 bp, Artificial Sequence
  Synthetic Oligonucleotide
mcmccmgamagmaamamaamgamcmcdtdt

SEQ ID NO: 17210 - DNA, 19 bp, Artificial Sequence
  Synthetic Oligonucleotide
cgggactctagcatactta

SEQ ID NO: 17211 - DNA, 19 bp, Artificial Sequence
  Synthetic Oligonucleotide
actgacagccagacagcga

SEQ ID NO: 17212 - DNA, 19 bp, Artificial Sequence
  Synthetic Oligonucleotide
agacagcgaccaaaagaat

SEQ ID NO: 17213 - DNA, 19 bp, Artificial Sequence
  Synthetic Oligonucleotide
atgaagatctgttccacca

SEQ ID NO: 17214 - DNA, 19 bp, Artificial Sequence
  Synthetic Oligonucleotide
gatctgttccaccattgaa

SEQ ID NO: 17215 - DNA, 19 bp, Artificial Sequence
  Synthetic Oligonucleotide
gcaattgaggagtgcctga

SEQ ID NO: 17216 - DNA, 19 bp, Artificial Sequence
  Synthetic Oligonucleotide
ttgaggagtgcctgattaa

SEQ ID NO: 17217 - DNA, 19 bp, Artificial Sequence
  Synthetic Oligonucleotide
ggatcttatttcttcggag

SEQ ID NO: 17218 - DNA, 19 bp, Artificial Sequence
  Synthetic Oligonucleotide
gatcttatttcttcggaga

SEQ ID NO: 17219 - DNA, 19 bp, Artificial Sequence
  Synthetic Oligonucleotide
acctatgactggactctaa

SEQ ID NO: 17220 - RNA, 19 nt, Artificial Sequence
  Synthetic Oligonucleotide
gccacugaaaucagagcau

SEQ ID NO: 17221 - RNA, 19 nt, Artificial Sequence
  Synthetic Oligonucleotide
ucagagcauccgucggaaa

SEQ ID NO: 17222 - RNA, 19 nt, Artificial Sequence
  Synthetic Oligonucleotide
ggacgauucuacauccaaa

SEQ ID NO: 17223 - RNA, 19 nt, Artificial Sequence
  Synthetic Oligonucleotide
cagcuuaacaauagagaga

SEQ ID NO: 17224 - RNA, 19 nt, Artificial Sequence
  Synthetic Oligonucleotide
gcuuaacaauagagagaau

SEQ ID NO: 17225 - RNA, 19 nt, Artificial Sequence
  Synthetic Oligonucleotide
aauagagagaauggugcuc

SEQ ID NO: 17226 - RNA, 19 nt, Artificial Sequence
  Synthetic Oligonucleotide
gggaaagauccuaagaaaa

SEQ ID NO: 17227 - RNA, 19 nt, Artificial Sequence
  Synthetic Oligonucleotide
ggaaagauccuaagaaaac

SEQ ID NO: 17228 - RNA, 19 nt, Artificial Sequence
  Synthetic Oligonucleotide
ugagagaacucauccuuua

SEQ ID NO: 17229 - RNA, 19 nt, Artificial Sequence
  Synthetic Oligonucleotide
uuaugacaaagaagaaaua

SEQ ID NO: 17230 - RNA, 19 nt, Artificial Sequence
  Synthetic Oligonucleotide
acaagaauugcuuaugaaa

SEQ ID NO: 17231 - RNA, 19 nt, Artificial Sequence
  Synthetic Oligonucleotide
gaauugcuuaugaaagaau

SEQ ID NO: 17232 - RNA, 19 nt, Artificial Sequence
  Synthetic Oligonucleotide
aagcaaugauggaucaagu

SEQ ID NO: 17233 - RNA, 19 nt, Artificial Sequence
  Synthetic Oligonucleotide
gcaaugauggaucaaguga

SEQ ID NO: 17234 - RNA, 19 nt, Artificial Sequence
  Synthetic Oligonucleotide
ugauggaucaagugagaga

SEQ ID NO: 17235 - RNA, 19 nt, Artificial Sequence
  Synthetic Oligonucleotide
ccacuagaggaguucaaau

SEQ ID NO: 17236 - RNA, 19 nt, Artificial Sequence
  Synthetic Oligonucleotide
cacuagaggaguucaaauu

SEQ ID NO: 17237 - RNA, 19 nt, Artificial Sequence
  Synthetic Oligonucleotide
gaggaaacaccaaucaaca

SEQ ID NO: 17238 - RNA, 19 nt, Artificial Sequence
  Synthetic Oligonucleotide
ggaaacaccaaucaacaga

SEQ ID NO: 17239 - RNA, 19 nt, Artificial Sequence
  Synthetic Oligonucleotide
gggccaaaucagcauacaa

SEQ ID NO: 17240 - RNA, 19 nt, Artificial Sequence
  Synthetic Oligonucleotide
caaccauuauggcagcauu

SEQ ID NO: 17241 - RNA, 19 nt, Artificial Sequence
  Synthetic Oligonucleotide
ccauuauggcagcauucaa

SEQ ID NO: 17242 - RNA, 19 nt, Artificial Sequence
  Synthetic Oligonucleotide
aggaugauggaaagugcaa

SEQ ID NO: 17243 - RNA, 19 nt, Artificial Sequence
  Synthetic Oligonucleotide
gaugauggaaagugcaaga

SEQ ID NO: 17244 - RNA, 19 nt, Artificial Sequence
  Synthetic Oligonucleotide
gaguaaugaaggaucuuau

SEQ ID NO: 17245 - RNA, 19 nt, Artificial Sequence
  Synthetic Oligonucleotide
ggaucuuauuucuucggag

SEQ ID NO: 17246 - RNA, 19 nt, Artificial Sequence
  Synthetic Oligonucleotide
gaucuuauuucuucggaga

SEQ ID NO: 17247 - RNA, 19 nt, Artificial Sequence
  Synthetic Oligonucleotide
ucuuauuucuucggagaca

SEQ ID NO: 17248 - RNA, 19 nt, Artificial Sequence
  Synthetic Oligonucleotide
ggaguacgacaauuaaaga

SEQ ID NO: 17249 - DNA, 50 bp, Artificial Sequence
  Synthetic Oligonucleotide
aatgaaggatcttatttcttcggagacaatgcagaggagtacgacaatta

SEQ ID NO: 17250 - DNA, 50 bp, Artificial Sequence; identical to SEQ ID NO: 17249
  Synthetic Oligonucleotide

SEQ ID NO: 17251 - DNA, 50 bp, Artificial Sequence; identical to SEQ ID NO: 17249
  Synthetic Oligonucleotide

SEQ ID NO: 17252 - DNA, 50 bp, Artificial Sequence; identical to SEQ ID NO: 17249
  Synthetic Oligonucleotide

SEQ ID NO: 17253 - DNA, 50 bp, Artificial Sequence; identical to SEQ ID NO: 17249
  Synthetic Oligonucleotide

SEQ ID NO: 17254 - DNA, 50 bp, Artificial Sequence
  Synthetic Oligonucleotide
aatgaaggatcttatttcttcggagacaatgcagaggaatatgacaattg

SEQ ID NO: 17255 - DNA, 50 bp, Artificial Sequence
  Synthetic Oligonucleotide
aacgagggatcttatttcttcggagacaatgcagaggaatatgacaatta

SEQ ID NO: 17256 - DNA, 50 bp, Artificial Sequence
  Synthetic Oligonucleotide
aatgaagggtcttatttcttcggagacaatgctgaggagtttgacagtta

SEQ ID NO: 17257 - DNA, 50 bp, Artificial Sequence
  Synthetic Oligonucleotide
aatgagggatcttatttcttcggagacaatgctgaggagtatgacaattg

SEQ ID NO: 17258 - DNA, 50 bp, Artificial Sequence
  Synthetic Oligonucleotide
aatgaaggatcttatttcttcggagacaatgcataggagtatgacaatta

SEQ ID NO: 17259 - DNA, 50 bp, Artificial Sequence
  Synthetic Oligonucleotide
aacgaagggtcttatttcttcggagacaatgcagaggaatatgacaatta

SEQ ID NO: 17260 - RNA, 8 nt, Artificial Sequence
  Synthetic Oligonucleotide
aaaaaaaa

SEQ ID NO: 17261 - DNA, 8 bp, Artificial Sequence
  Synthetic Oligonucleotide
tttgttat
